United States Patent Application Publication US 2026/0015617 A1 - sequence listing, part 2

SEQ ID NO: 2340 - RNA, 23 nt, synthetic construct
  source 1..23: mol_type = other RNA
  modified_base 1: mod_base = OTHER; note = 2'-O-methyluridine-3'-phosphorothioate
  modified_base 2: mod_base = OTHER; note = 2'-fluorouridine-3'-phosphorothioate
  modified_base 3: mod_base = OTHER; note = 2'-O-methylcytidine-3'-phosphate
  modified_base 4: mod_base = OTHER; note = 2'-O-methyladenosine-3'-phosphate
  modified_base 5: mod_base = OTHER; note = 2'-O-methyladenosine-3'-phosphate
  modified_base 6: mod_base = OTHER; note = 2'-fluoroguanosine-3'-phosphate
  modified_base 7: mod_base = OTHER; note = 2'-O-methyluridine-3'-phosphate
  modified_base 8: mod_base = OTHER; note = 2'-fluorouridine-3'-phosphate
  modified_base 9: mod_base = OTHER; note = 2'-O-methyladenosine-3'-phosphate
  modified_base 10: mod_base = OTHER; note = 2'-O-methylcytidine-3'-phosphate
  modified_base 11: mod_base = OTHER; note = 2'-O-methyladenosine-3'-phosphate
  modified_base 12: mod_base = OTHER; note = 2'-O-methyladenosine-3'-phosphate
  modified_base 13: mod_base = OTHER; note = 2'-O-methyladenosine-3'-phosphate
  modified_base 14: mod_base = OTHER; note = 2'-fluoroadenosine-3'-phosphate
  modified_base 15: mod_base = OTHER; note = 2'-O-methylguanosine-3'-phosphate
  modified_base 16: mod_base = OTHER; note = 2'-fluorocytidine-3'-phosphate
  modified_base 17: mod_base = OTHER; note = 2'-O-methyladenosine-3'-phosphate
  modified_base 18: mod_base = OTHER; note = 2'-O-methyladenosine-3'-phosphate
  modified_base 19: mod_base = OTHER; note = 2'-O-methyladenosine-3'-phosphate
  modified_base 20: mod_base = OTHER; note = 2'-O-methyladenosine-3'-phosphate
  modified_base 21: mod_base = OTHER; note = 2'-O-methylcytidine-3'-phosphorothioate
  modified_base 22: mod_base = OTHER; note = 2'-O-methyladenosine-3'-phosphorothioate
  modified_base 23: mod_base = OTHER; note = 2'-O-methylguanosine
ttcaagttacaaaagcaaaacag

SEQ ID NO: 2341 - RNA, 21 nt, synthetic construct
  source 1..21: mol_type = other RNA
  modified_base 1: mod_base = OTHER; note = 2'-O-methylguanosine-3'-phosphorothioate
  modified_base 2: mod_base = OTHER; note = 2'-O-methyluridine-3'-phosphorothioate
  modified_base 3: mod_base = OTHER; note = 2'-O-methyluridine-3'-phosphate
  modified_base 4: mod_base = OTHER; note = 2'-O-methyluridine-3'-phosphate
  modified_base 5: mod_base = OTHER; note = 2'-O-methyluridine-3'-phosphate
  modified_base 6: mod_base = OTHER; note = 2'-O-methylguanosine-3'-phosphate
  modified_base 7: mod_base = OTHER; note = 2'-fluorocytidine-3'-phosphate
  modified_base 8: mod_base = OTHER; note = 2'-O-methyluridine-3'-phosphate
  modified_base 9: mod_base = OTHER; note = 2'-fluorouridine-3'-phosphate
  modified_base 10: mod_base = OTHER; note = 2'-fluorouridine-3'-phosphate
  modified_base 11: mod_base = OTHER; note = 2'-fluorouridine-3'-phosphate
  modified_base 12: mod_base = OTHER; note = 2'-O-methylguanosine-3'-phosphate
  modified_base 13: mod_base = OTHER; note = 2'-O-methyluridine-3'-phosphate
  modified_base 14: mod_base = OTHER; note = 2'-O-methyladenosine-3'-phosphate
  modified_base 15: mod_base = OTHER; note = 2'-O-methyladenosine-3'-phosphate
  modified_base 16: mod_base = OTHER; note = 2'-O-methylcytidine-3'-phosphate
  modified_base 17: mod_base = OTHER; note = 2'-O-methyluridine-3'-phosphate
  modified_base 18: mod_base = OTHER; note = 2'-O-methyluridine-3'-phosphate
  modified_base 19: mod_base = OTHER; note = 2'-O-methylguanosine-3'-phosphate
  modified_base 20: mod_base = OTHER; note = 2'-O-methyladenosine-3'-phosphate
  modified_base 21: mod_base = OTHER; note = 2'-O-methyladenosine
gttttgcttttgtaacttgaa

SEQ ID NO: 2342 - RNA, 23 nt, synthetic construct
  source 1..23: mol_type = other RNA
  modified_base 1: mod_base = OTHER; note = 2'-O-methyluridine-3'-phosphorothioate
  modified_base 2: mod_base = OTHER; note = 2'-fluorouridine-3'-phosphorothioate
  modified_base 3: mod_base = OTHER; note = 2'-O-methylcytidine-3'-phosphate
  modified_base 4: mod_base = OTHER; note = 2'-O-methyladenosine-3'-phosphate
  modified_base 5: mod_base = OTHER; note = 2'-O-methyladenosine-3'-phosphate
  modified_base 6: mod_base = OTHER; note = 2'-fluoroguanosine-3'-phosphate
  modified_base 7: mod_base = OTHER; note = 2'-O-methyluridine-3'-phosphate
  modified_base 8: mod_base = OTHER; note = 2'-O-methyluridine-3'-phosphate
  modified_base 9: mod_base = OTHER; note = 2'-fluoroadenosine-3'-phosphate
  modified_base 10: mod_base = OTHER; note = 2'-O-methylcytidine-3'-phosphate
  modified_base 11: mod_base = OTHER; note = 2'-O-methyladenosine-3'-phosphate
  modified_base 12: mod_base = OTHER; note = 2'-O-methyladenosine-3'-phosphate
  modified_base 13: mod_base = OTHER; note = 2'-O-methyladenosine-3'-phosphate
  modified_base 14: mod_base = OTHER; note = 2'-fluoroadenosine-3'-phosphate
  modified_base 15: mod_base = OTHER; note = 2'-O-methylguanosine-3'-phosphate
  modified_base 16: mod_base = OTHER; note = 2'-fluorocytidine-3'-phosphate
  modified_base 17: mod_base = OTHER; note = 2'-O-methyladenosine-3'-phosphate
  modified_base 18: mod_base = OTHER; note = 2'-O-methyladenosine-3'-phosphate
  modified_base 19: mod_base = OTHER; note = 2'-O-methyladenosine-3'-phosphate
  modified_base 20: mod_base = OTHER; note = 2'-O-methyladenosine-3'-phosphate
  modified_base 21: mod_base = OTHER; note = 2'-O-methylcytidine-3'-phosphorothioate
  modified_base 22: mod_base = OTHER; note = 2'-O-methyladenosine-3'-phosphorothioate
  modified_base 23: mod_base = OTHER; note = 2'-O-methylguanosine
ttcaagttacaaaagcaaaacag

SEQ ID NO: 2343 - RNA, 21 nt, synthetic construct
  source 1..21: mol_type = other RNA
  modified_base 1: mod_base = OTHER; note = 2'-O-methylguanosine-3'-phosphorothioate
  modified_base 2: mod_base = OTHER; note = 2'-O-methyluridine-3'-phosphorothioate
  modified_base 3: mod_base = OTHER; note = 2'-O-methyluridine-3'-phosphate
  modified_base 4: mod_base = OTHER; note = 2'-O-methyluridine-3'-phosphate
  modified_base 5: mod_base = OTHER; note = 2'-O-methyluridine-3'-phosphate
  modified_base 6: mod_base = OTHER; note = 2'-O-methylguanosine-3'-phosphate
  modified_base 7: mod_base = OTHER; note = 2'-O-methylcytidine-3'-phosphate
  modified_base 8: mod_base = OTHER; note = 2'-O-methyluridine-3'-phosphate
  modified_base 9: mod_base = OTHER; note = 2'-fluorouridine-3'-phosphate
  modified_base 10: mod_base = OTHER; note = 2'-fluorouridine-3'-phosphate
  modified_base 11: mod_base = OTHER; note = 2'-fluorouridine-3'-phosphate
  modified_base 12: mod_base = OTHER; note = 2'-O-methylguanosine-3'-phosphate
  modified_base 13: mod_base = OTHER; note = 2'-O-methyluridine-3'-phosphate
  modified_base 14: mod_base = OTHER; note = 2'-O-methyladenosine-3'-phosphate
  modified_base 15: mod_base = OTHER; note = 2'-O-methyladenosine-3'-phosphate
  modified_base 16: mod_base = OTHER; note = 2'-O-methylcytidine-3'-phosphate
  modified_base 17: mod_base = OTHER; note = 2'-O-methyluridine-3'-phosphate
  modified_base 18: mod_base = OTHER; note = 2'-O-methyluridine-3'-phosphate
  modified_base 19: mod_base = OTHER; note = 2'-O-methylguanosine-3'-phosphate
  modified_base 20: mod_base = OTHER; note = 2'-O-methyladenosine-3'-phosphate
  modified_base 21: mod_base = OTHER; note = 2'-O-methyladenosine
gttttgcttttgtaacttgaa

SEQ ID NO: 2344 - RNA, 23 nt, synthetic construct
  source 1..23: mol_type = other RNA
  modified_base 1: mod_base = OTHER; note = 2'-O-methyluridine-3'-phosphorothioate
  modified_base 2: mod_base = OTHER; note = 2'-fluorouridine-3'-phosphorothioate
  modified_base 3: mod_base = OTHER; note = 2'-O-methylcytidine-3'-phosphate
  modified_base 4: mod_base = OTHER; note = 2'-O-methyladenosine-3'-phosphate
  modified_base 5: mod_base = OTHER; note = 2'-O-methyladenosine-3'-phosphate
  modified_base 6: mod_base = OTHER; note = 2'-fluoroguanosine-3'-phosphate
  modified_base 7: mod_base = OTHER; note = 2'-O-methyluridine-3'-phosphate
  modified_base 8: mod_base = OTHER; note = 2'-fluorouridine-3'-phosphate
  modified_base 9: mod_base = OTHER; note = 2'-O-methyladenosine-3'-phosphate
  modified_base 10: mod_base = OTHER; note = 2'-O-methylcytidine-3'-phosphate
  modified_base 11: mod_base = OTHER; note = 2'-O-methyladenosine-3'-phosphate
  modified_base 12: mod_base = OTHER; note = 2'-O-methyladenosine-3'-phosphate
  modified_base 13: mod_base = OTHER; note = 2'-O-methyladenosine-3'-phosphate
  modified_base 14: mod_base = OTHER; note = 2'-fluoroadenosine-3'-phosphate
  modified_base 15: mod_base = OTHER; note = 2'-O-methylguanosine-3'-phosphate
  modified_base 16: mod_base = OTHER; note = 2'-fluorocytidine-3'-phosphate
  modified_base 17: mod_base = OTHER; note = 2'-O-methyladenosine-3'-phosphate
  modified_base 18: mod_base = OTHER; note = 2'-O-methyladenosine-3'-phosphate
  modified_base 19: mod_base = OTHER; note = 2'-O-methyladenosine-3'-phosphate
  modified_base 20: mod_base = OTHER; note = 2'-O-methyladenosine-3'-phosphate
  modified_base 21: mod_base = OTHER; note = 2'-O-methylcytidine-3'-phosphorothioate
  modified_base 22: mod_base = OTHER; note = 2'-O-methyladenosine-3'-phosphorothioate
  modified_base 23: mod_base = OTHER; note = 2'-O-methylguanosine
ttcaagttacaaaagcaaaacag

SEQ ID NO: 2345 - RNA, 21 nt, synthetic construct
  source 1..21: mol_type = other RNA
  modified_base 1: mod_base = OTHER; note = 2'-O-methylguanosine-3'-phosphorothioate
  modified_base 2: mod_base = OTHER; note = 2'-O-methyluridine-3'-phosphorothioate
  modified_base 3: mod_base = OTHER; note = 2'-O-methyluridine-3'-phosphate
  modified_base 4: mod_base = OTHER; note = 2'-O-methyluridine-3'-phosphate
  modified_base 5: mod_base = OTHER; note = 2'-O-methyluridine-3'-phosphate
  modified_base 6: mod_base = OTHER; note = 2'-O-methylguanosine-3'-phosphate
  modified_base 7: mod_base = OTHER; note = 2'-O-methylcytidine-3'-phosphate
  modified_base 8: mod_base = OTHER; note = 2'-O-methyluridine-3'-phosphate
  modified_base 9: mod_base = OTHER; note = 2'-fluorouridine-3'-phosphate
  modified_base 10: mod_base = OTHER; note = 2'-fluorouridine-3'-phosphate
  modified_base 11: mod_base = OTHER; note = 2'-fluorouridine-3'-phosphate
  modified_base 12: mod_base = OTHER; note = 2'-O-methylguanosine-3'-phosphate
  modified_base 13: mod_base = OTHER; note = 2'-O-methyluridine-3'-phosphate
  modified_base 14: mod_base = OTHER; note = 2'-O-methyladenosine-3'-phosphate
  modified_base 15: mod_base = OTHER; note = 2'-O-methyladenosine-3'-phosphate
  modified_base 16: mod_base = OTHER; note = 2'-O-methylcytidine-3'-phosphate
  modified_base 17: mod_base = OTHER; note = 2'-O-methyluridine-3'-phosphate
  modified_base 18: mod_base = OTHER; note = 2'-O-methyluridine-3'-phosphate
  modified_base 19: mod_base = OTHER; note = 2'-O-methylguanosine-3'-phosphate
  modified_base 20: mod_base = OTHER; note = 2'-O-methyladenosine-3'-phosphate
  modified_base 21: mod_base = OTHER; note = 2'-O-methyladenosine
gttttgcttttgtaacttgaa

SEQ ID NO: 2346 - RNA, 23 nt, synthetic construct
  source 1..23: mol_type = other RNA
  modified_base 1: mod_base = OTHER; note = 2'-O-methyluridine-3'-phosphorothioate
  modified_base 2: mod_base = OTHER; note = 2'-fluorouridine-3'-phosphorothioate
  modified_base 3: mod_base = OTHER; note = 2'-O-methylcytidine-3'-phosphate
  modified_base 4: mod_base = OTHER; note = 2'-O-methyladenosine-3'-phosphate
  modified_base 5: mod_base = OTHER; note = 2'-O-methyladenosine-3'-phosphate
  modified_base 6: mod_base = OTHER; note = 2'-fluoroguanosine-3'-phosphate
  modified_base 7: mod_base = OTHER; note = 2'-O-methyluridine-3'-phosphate
  modified_base 8: mod_base = OTHER; note = 2'-O-methyluridine-3'-phosphate
  modified_base 9: mod_base = OTHER; note = 2'-fluoroadenosine-3'-phosphate
  modified_base 10: mod_base = OTHER; note = 2'-O-methylcytidine-3'-phosphate
  modified_base 11: mod_base = OTHER; note = 2'-O-methyladenosine-3'-phosphate
  modified_base 12: mod_base = OTHER; note = 2'-O-methyladenosine-3'-phosphate
  modified_base 13: mod_base = OTHER; note = 2'-O-methyladenosine-3'-phosphate
  modified_base 14: mod_base = OTHER; note = 2'-fluoroadenosine-3'-phosphate
  modified_base 15: mod_base = OTHER; note = 2'-O-methylguanosine-3'-phosphate
  modified_base 16: mod_base = OTHER; note = 2'-fluorocytidine-3'-phosphate
  modified_base 17: mod_base = OTHER; note = 2'-O-methyladenosine-3'-phosphate
  modified_base 18: mod_base = OTHER; note = 2'-O-methyladenosine-3'-phosphate
  modified_base 19: mod_base = OTHER; note = 2'-O-methyladenosine-3'-phosphate
  modified_base 20: mod_base = OTHER; note = 2'-O-methyladenosine-3'-phosphate
  modified_base 21: mod_base = OTHER; note = 2'-O-methylcytidine-3'-phosphorothioate
  modified_base 22: mod_base = OTHER; note = 2'-O-methyladenosine-3'-phosphorothioate
  modified_base 23: mod_base = OTHER; note = 2'-O-methylguanosine
ttcaagttacaaaagcaaaacag

SEQ ID NO: 2347 - RNA, 21 nt, synthetic construct
  source 1..21: mol_type = other RNA
  modified_base 1: mod_base = OTHER; note = 2'-O-methylguanosine-3'-phosphorothioate
  modified_base 2: mod_base = OTHER; note = 2'-O-methyluridine-3'-phosphorothioate
  modified_base 3: mod_base = OTHER; note = 2'-O-methyluridine-3'-phosphate
  modified_base 4: mod_base = OTHER; note = 2'-O-methyluridine-3'-phosphate
  modified_base 5: mod_base = OTHER; note = 2'-O-methyluridine-3'-phosphate
  modified_base 6: mod_base = OTHER; note = 2'-O-methylguanosine-3'-phosphate
  modified_base 7: mod_base = OTHER; note = 2'-O-methylcytidine-3'-phosphate
  modified_base 8: mod_base = OTHER; note = 2'-O-methyluridine-3'-phosphate
  modified_base 9: mod_base = OTHER; note = 2'-fluorouridine-3'-phosphate
  modified_base 10: mod_base = OTHER; note = 2'-fluorouridine-3'-phosphate
  modified_base 11: mod_base = OTHER; note = 2'-fluorouridine-3'-phosphate
  modified_base 12: mod_base = OTHER; note = 2'-O-methylguanosine-3'-phosphate
  modified_base 13: mod_base = OTHER; note = 2'-O-methyluridine-3'-phosphate
  modified_base 14: mod_base = OTHER; note = 2'-O-methyladenosine-3'-phosphate
  modified_base 15: mod_base = OTHER; note = 2'-O-methyladenosine-3'-phosphate
  modified_base 16: mod_base = OTHER; note = 2'-O-methylcytidine-3'-phosphate
  modified_base 17: mod_base = OTHER; note = 2'-O-methyluridine-3'-phosphate
  modified_base 18: mod_base = OTHER; note = 2'-O-methyluridine-3'-phosphate
  modified_base 19: mod_base = OTHER; note = 2'-O-methylguanosine-3'-phosphate
  modified_base 20: mod_base = OTHER; note = 2'-O-methyladenosine-3'-phosphate
  modified_base 21: mod_base = OTHER; note = 2'-O-methyladenosine
gttttgcttttgtaacttgaa

SEQ ID NO: 2348 - RNA, 23 nt, synthetic construct
  source 1..23: mol_type = other RNA
  modified_base 1: mod_base = OTHER; note = 2'-O-methyluridine-3'-phosphorothioate
  modified_base 2: mod_base = OTHER; note = 2'-fluorouridine-3'-phosphorothioate
  modified_base 3: mod_base = OTHER; note = 2'-O-methylcytidine-3'-phosphate
  modified_base 4: mod_base = OTHER; note = 2'-O-methyladenosine-3'-phosphate
  modified_base 5: mod_base = OTHER; note = 2'-O-methyladenosine-3'-phosphate
  modified_base 6: mod_base = OTHER; note = 2'-fluoroguanosine-3'-phosphate
  modified_base 7: mod_base = OTHER; note = 2'-O-methyluridine-3'-phosphate
  modified_base 8: mod_base = OTHER; note = 2'-O-methyluridine-3'-phosphate
  modified_base 9: mod_base = OTHER; note = 2'-O-methyladenosine-3'-phosphate
  modified_base 10: mod_base = OTHER; note = 2'-O-methylcytidine-3'-phosphate
  modified_base 11: mod_base = OTHER; note = 2'-O-methyladenosine-3'-phosphate
  modified_base 12: mod_base = OTHER; note = 2'-O-methyladenosine-3'-phosphate
  modified_base 13: mod_base = OTHER; note = 2'-O-methyladenosine-3'-phosphate
  modified_base 14: mod_base = OTHER; note = 2'-fluoroadenosine-3'-phosphate
  modified_base 15: mod_base = OTHER; note = 2'-O-methylguanosine-3'-phosphate
  modified_base 16: mod_base = OTHER; note = 2'-fluorocytidine-3'-phosphate
  modified_base 17: mod_base = OTHER; note = 2'-O-methyladenosine-3'-phosphate
  modified_base 18: mod_base = OTHER; note = 2'-O-methyladenosine-3'-phosphate
  modified_base 19: mod_base = OTHER; note = 2'-O-methyladenosine-3'-phosphate
  modified_base 20: mod_base = OTHER; note = 2'-O-methyladenosine-3'-phosphate
  modified_base 21: mod_base = OTHER; note = 2'-O-methylcytidine-3'-phosphorothioate
  modified_base 22: mod_base = OTHER; note = 2'-O-methyladenosine-3'-phosphorothioate
  modified_base 23: mod_base = OTHER; note = 2'-O-methylguanosine
ttcaagttacaaaagcaaaacag

SEQ ID NO: 2349 - RNA, 21 nt, synthetic construct
  source 1..21: mol_type = other RNA
gttttgcttttgtaacttgaa

SEQ ID NO: 2350 - RNA, 23 nt, synthetic construct
  source 1..23: mol_type = other RNA
ttcaagttacaaaagcaaaactt

SEQ ID NO: 2351 - RNA, 21 nt, synthetic construct
  source 1..21: mol_type = other RNA
  modified_base 1: mod_base = OTHER; note = 2'-O-methylguanosine-3'-phosphorothioate
  modified_base 2: mod_base = OTHER; note = 2'-O-methyluridine-3'-phosphorothioate
  modified_base 3: mod_base = OTHER; note = 2'-O-methyluridine-3'-phosphate
  modified_base 4: mod_base = OTHER; note = 2'-O-methyluridine-3'-phosphate
  modified_base 5: mod_base = OTHER; note = 2'-O-methyluridine-3'-phosphate
  modified_base 6: mod_base = OTHER; note = 2'-O-methylguanosine-3'-phosphate
  modified_base 7: mod_base = OTHER; note = 2'-fluorocytidine-3'-phosphate
  modified_base 8: mod_base = OTHER; note = 2'-O-methyluridine-3'-phosphate
  modified_base 9: mod_base = OTHER; note = 2'-fluorouridine-3'-phosphate
  modified_base 10: mod_base = OTHER; note = 2'-O-methyluridine-3'-phosphate
  modified_base 11: mod_base = OTHER; note = 2'-O-methyluridine-3'-phosphate
  modified_base 12: mod_base = OTHER; note = 2'-O-methylguanosine-3'-phosphate
  modified_base 13: mod_base = OTHER; note = 2'-O-methyluridine-3'-phosphate
  modified_base 14: mod_base = OTHER; note = 2'-O-methyladenosine-3'-phosphate
  modified_base 15: mod_base = OTHER; note = 2'-O-methyladenosine-3'-phosphate
  modified_base 16: mod_base = OTHER; note = 2'-O-methylcytidine-3'-phosphate
  modified_base 17: mod_base = OTHER; note = 2'-O-methyluridine-3'-phosphate
  modified_base 18: mod_base = OTHER; note = 2'-O-methyluridine-3'-phosphate
  modified_base 19: mod_base = OTHER; note = 2'-O-methylguanosine-3'-phosphate
  modified_base 20: mod_base = OTHER; note = 2'-O-methyladenosine-3'-phosphate
  modified_base 21: mod_base = OTHER; note = 2'-O-methyladenosine
gttttgcttttgtaacttgaa

SEQ ID NO: 2352 - RNA, 23 nt, synthetic construct
  source 1..23: mol_type = other RNA
  modified_base 1: mod_base = OTHER; note = 2'-O-methyluridine-3'-phosphorothioate
  modified_base 2: mod_base = OTHER; note = 2'-fluorouridine-3'-phosphorothioate
  modified_base 3: mod_base = OTHER; note = 2'-O-methylcytidine-3'-phosphate
  modified_base 4: mod_base = OTHER; note = 2'-fluoroadenosine-3'-phosphate
  modified_base 5: mod_base = OTHER; note = 2'-fluoroadenosine-3'-phosphate
  modified_base 6: mod_base = OTHER; note = 2'-fluoroguanosine-3'-phosphate
  modified_base 7: mod_base = OTHER; note = 2'-O-methyluridine-3'-phosphate
  modified_base 8: mod_base = OTHER; note = 2'-fluorouridine-3'-phosphate
  modified_base 9: mod_base = OTHER; note = 2'-O-methyladenosine-3'-phosphate
  modified_base 10: mod_base = OTHER; note = 2'-fluorocytidine-3'-phosphate
  modified_base 11: mod_base = OTHER; note = 2'-O-methyladenosine-3'-phosphate
  modified_base 12: mod_base = OTHER; note = 2'-fluoroadenosine-3'-phosphate
  modified_base 13: mod_base = OTHER; note = 2'-O-methyladenosine-3'-phosphate
  modified_base 14: mod_base = OTHER; note = 2'-fluoroadenosine-3'-phosphate
  modified_base 15: mod_base = OTHER; note = 2'-O-methylguanosine-3'-phosphate
  modified_base 16: mod_base = OTHER; note = 2'-fluorocytidine-3'-phosphate
  modified_base 17: mod_base = OTHER; note = 2'-O-methyladenosine-3'-phosphate
  modified_base 18: mod_base = OTHER; note = 2'-fluoroadenosine-3'-phosphate
  modified_base 19: mod_base = OTHER; note = 2'-O-methyladenosine-3'-phosphate
  modified_base 20: mod_base = OTHER; note = 2'-O-methyladenosine-3'-phosphate
  modified_base 21: mod_base = OTHER; note = 2'-O-methylcytidine-3'-phosphorothioate
  modified_base 22: mod_base = OTHER; note = 2'-O-methyluridine-3'-phosphorothioate
  modified_base 23: mod_base = OTHER; note = 2'-O-methyluridine
ttcaagttacaaaagcaaaactt

SEQ ID NO: 2353 - RNA, 21 nt, synthetic construct
  source 1..21: mol_type = other RNA
  modified_base 1: mod_base = OTHER; note = 2'-O-methylguanosine-3'-phosphorothioate
  modified_base 2: mod_base = OTHER; note = 2'-O-methyluridine-3'-phosphorothioate
  modified_base 3: mod_base = OTHER; note = 2'-O-methyluridine-3'-phosphate
  modified_base 4: mod_base = OTHER; note = 2'-O-methyluridine-3'-phosphate
  modified_base 5: mod_base = OTHER; note = 2'-O-methyluridine-3'-phosphate
  modified_base 6: mod_base = OTHER; note = 2'-O-methylguanosine-3'-phosphate
  modified_base 7: mod_base = OTHER; note = 2'-fluorocytidine-3'-phosphate
  modified_base 8: mod_base = OTHER; note = 2'-O-methyluridine-3'-phosphate
  modified_base 9: mod_base = OTHER; note = 2'-fluorouridine-3'-phosphate
  modified_base 10: mod_base = OTHER; note = 2'-fluorouridine-3'-phosphate
  modified_base 11: mod_base = OTHER; note = 2'-fluorouridine-3'-phosphate
  modified_base 12: mod_base = OTHER; note = 2'-O-methylguanosine-3'-phosphate
  modified_base 13: mod_base = OTHER; note = 2'-O-methyluridine-3'-phosphate
  modified_base 14: mod_base = OTHER; note = 2'-O-methyladenosine-3'-phosphate
  modified_base 15: mod_base = OTHER; note = 2'-O-methyladenosine-3'-phosphate
  modified_base 16: mod_base = OTHER; note = 2'-O-methylcytidine-3'-phosphate
  modified_base 17: mod_base = OTHER; note = 2'-O-methyluridine-3'-phosphate
  modified_base 18: mod_base = OTHER; note = 2'-O-methyluridine-3'-phosphate
  modified_base 19: mod_base = OTHER; note = 2'-O-methylguanosine-3'-phosphate
  modified_base 20: mod_base = OTHER; note = 2'-O-methyladenosine-3'-phosphate
  modified_base 21: mod_base = OTHER; note = 2'-O-methyladenosine
gttttgcttttgtaacttgaa

SEQ ID NO: 2354 - RNA, 23 nt, synthetic construct
  source 1..23: mol_type = other RNA
  modified_base 1: mod_base = OTHER; note = 2'-O-methyluridine-3'-phosphorothioate
  modified_base 2: mod_base = OTHER; note = 2'-fluorouridine-3'-phosphorothioate
  modified_base 3: mod_base = OTHER; note = 2'-O-methylcytidine-3'-phosphate
  modified_base 4: mod_base = OTHER; note = 2'-O-methyladenosine-3'-phosphate
  modified_base 5: mod_base = OTHER; note = 2'-O-methyladenosine-3'-phosphate
  modified_base 6: mod_base = OTHER; note = 2'-fluoroguanosine-3'-phosphate
  modified_base 7: mod_base = OTHER; note = 2'-O-methyluridine-3'-phosphate
  modified_base 8: mod_base = OTHER; note = 2'-fluorouridine-3'-phosphate
  modified_base 9: mod_base = OTHER; note = 2'-fluoroadenosine-3'-phosphate
  modified_base 10: mod_base = OTHER; note = 2'-O-methylcytidine-3'-phosphate
  modified_base 11: mod_base = OTHER; note = 2'-O-methyladenosine-3'-phosphate
  modified_base 12: mod_base = OTHER; note = 2'-O-methyladenosine-3'-phosphate
  modified_base 13: mod_base = OTHER; note = 2'-O-methyladenosine-3'-phosphate
  modified_base 14: mod_base = OTHER; note = 2'-fluoroadenosine-3'-phosphate
  modified_base 15: mod_base = OTHER; note = 2'-O-methylguanosine-3'-phosphate
  modified_base 16: mod_base = OTHER; note = 2'-fluorocytidine-3'-phosphate
  modified_base 17: mod_base = OTHER; note = 2'-O-methyladenosine-3'-phosphate
  modified_base 18: mod_base = OTHER; note = 2'-O-methyladenosine-3'-phosphate
  modified_base 19: mod_base = OTHER; note = 2'-O-methyladenosine-3'-phosphate
  modified_base 20: mod_base = OTHER; note = 2'-O-methyladenosine-3'-phosphate
  modified_base 21: mod_base = OTHER; note = 2'-O-methylcytidine-3'-phosphorothioate
  modified_base 22: mod_base = OTHER; note = 2'-O-methyluridine-3'-phosphorothioate
  modified_base 23: mod_base = OTHER; note = 2'-O-methyluridine
ttcaagttacaaaagcaaaactt

SEQ ID NO: 2355 - RNA, 21 nt, synthetic construct
  source 1..21: mol_type = other RNA
  modified_base 1: mod_base = OTHER; note = 2'-O-methylguanosine-3'-phosphorothioate
  modified_base 2: mod_base = OTHER; note = 2'-O-methyluridine-3'-phosphorothioate
  modified_base 3: mod_base = OTHER; note = 2'-O-methyluridine-3'-phosphate
  modified_base 4: mod_base = OTHER; note = 2'-O-methyluridine-3'-phosphate
  modified_base 5: mod_base = OTHER; note = 2'-O-methyluridine-3'-phosphate
  modified_base 6: mod_base = OTHER; note = 2'-O-methylguanosine-3'-phosphate
  modified_base 7: mod_base = OTHER; note = 2'-fluorocytidine-3'-phosphate
  modified_base 8: mod_base = OTHER; note = 2'-O-methyluridine-3'-phosphate
  modified_base 9: mod_base = OTHER; note = 2'-fluorouridine-3'-phosphate
  modified_base 10: mod_base = OTHER; note = 2'-fluorouridine-3'-phosphate
  modified_base 11: mod_base = OTHER; note = 2'-fluorouridine-3'-phosphate
  modified_base 12: mod_base = OTHER; note = 2'-O-methylguanosine-3'-phosphate
  modified_base 13: mod_base = OTHER; note = 2'-O-methyluridine-3'-phosphate
  modified_base 14: mod_base = OTHER; note = 2'-O-methyladenosine-3'-phosphate
  modified_base 15: mod_base = OTHER; note = 2'-O-methyladenosine-3'-phosphate
  modified_base 16: mod_base = OTHER; note = 2'-O-methylcytidine-3'-phosphate
  modified_base 17: mod_base = OTHER; note = 2'-O-methyluridine-3'-phosphate
  modified_base 18: mod_base = OTHER; note = 2'-O-methyluridine-3'-phosphate
  modified_base 19: mod_base = OTHER; note = 2'-O-methylguanosine-3'-phosphate
  modified_base 20: mod_base = OTHER; note = 2'-O-methyladenosine-3'-phosphate
  modified_base 21: mod_base = OTHER; note = 2'-O-methyladenosine
gttttgcttttgtaacttgaa

SEQ ID NO: 2356 - RNA, 23 nt, synthetic construct
  source 1..23: mol_type = other RNA
  modified_base 1: mod_base = OTHER; note = 2'-O-methyluridine-3'-phosphorothioate
  modified_base 2: mod_base = OTHER; note = 2'-fluorouridine-3'-phosphorothioate
  modified_base 3: mod_base = OTHER; note = 2'-O-methylcytidine-3'-phosphate
  modified_base 4: mod_base = OTHER; note = 2'-O-methyladenosine-3'-phosphate
  modified_base 5: mod_base = OTHER; note = 2'-O-methyladenosine-3'-phosphate
  modified_base 6: mod_base = OTHER; note = 2'-fluoroguanosine-3'-phosphate
  modified_base 7: mod_base = OTHER; note = 2'-O-methyluridine-3'-phosphate
  modified_base 8: mod_base = OTHER; note = 2'-O-methyluridine-3'-phosphate
  modified_base 9: mod_base = OTHER; note = 2'-O-methyladenosine-3'-phosphate
  modified_base 10: mod_base = OTHER; note = 2'-O-methylcytidine-3'-phosphate
  modified_base 11: mod_base = OTHER; note = 2'-O-methyladenosine-3'-phosphate
  modified_base 12: mod_base = OTHER; note = 2'-O-methyladenosine-3'-phosphate
  modified_base 13: mod_base = OTHER; note = 2'-O-methyladenosine-3'-phosphate
  modified_base 14: mod_base = OTHER; note = 2'-fluoroadenosine-3'-phosphate
  modified_base 15: mod_base = OTHER; note = 2'-O-methylguanosine-3'-phosphate
  modified_base 16: mod_base = OTHER; note = 2'-fluorocytidine-3'-phosphate
  modified_base 17: mod_base = OTHER; note = 2'-O-methyladenosine-3'-phosphate
  modified_base 18: mod_base = OTHER; note = 2'-O-methyladenosine-3'-phosphate
  modified_base 19: mod_base = OTHER; note = 2'-O-methyladenosine-3'-phosphate
  modified_base 20: mod_base = OTHER; note = 2'-O-methyladenosine-3'-phosphate
  modified_base 21: mod_base = OTHER; note = 2'-O-methylcytidine-3'-phosphorothioate
  modified_base 22: mod_base = OTHER; note = 2'-O-methyluridine-3'-phosphorothioate
  modified_base 23: mod_base = OTHER; note = 2'-O-methyluridine
ttcaagttacaaaagcaaaactt

SEQ ID NO: 2357 - RNA, 21 nt, synthetic construct
  source 1..21: mol_type = other RNA
  modified_base 1: mod_base = OTHER; note = 2'-fluoroguanosine-3'-phosphorothioate
  modified_base 2: mod_base = OTHER; note = 2'-O-methyluridine-3'-phosphorothioate
  modified_base 3: mod_base = OTHER; note = 2'-fluorouridine-3'-phosphate
  modified_base 4: mod_base = OTHER; note = 2'-O-methyluridine-3'-phosphate
  modified_base 5: mod_base = OTHER; note = 2'-fluorouridine-3'-phosphate
  modified_base 6: mod_base = OTHER; note = 2'-O-methylguanosine-3'-phosphate
  modified_base 7: mod_base = OTHER; note = 2'-fluorocytidine-3'-phosphate
  modified_base 8: mod_base = OTHER; note = 2'-O-methyluridine-3'-phosphate
  modified_base 9: mod_base = OTHER; note = 2'-fluorouridine-3'-phosphate
  modified_base 10: mod_base = OTHER; note = 2'-fluorouridine-3'-phosphate
  modified_base 11: mod_base = OTHER; note = 2'-fluorouridine-3'-phosphate
  modified_base 12: mod_base = OTHER; note = 2'-O-methylguanosine-3'-phosphate
  modified_base 13: mod_base = OTHER; note = 2'-fluorouridine-3'-phosphate
  modified_base 14: mod_base = OTHER; note = 2'-O-methyladenosine-3'-phosphate
  modified_base 15: mod_base = OTHER; note = 2'-fluoroadenosine-3'-phosphate
  modified_base 16: mod_base = OTHER; note = 2'-O-methylcytidine-3'-phosphate
  modified_base 17: mod_base = OTHER; note = 2'-fluorouridine-3'-phosphate
  modified_base 18: mod_base = OTHER; note = 2'-O-methyluridine-3'-phosphate
  modified_base 19: mod_base = OTHER; note = 2'-fluoroguanosine-3'-phosphate
  modified_base 20: mod_base = OTHER; note = 2'-O-methyladenosine-3'-phosphate
  modified_base 21: mod_base = OTHER; note = 2'-fluoroadenosine
gttttgcttttgtaacttgaa

SEQ ID NO: 2358 - RNA, 23 nt, synthetic construct
  source 1..23: mol_type = other RNA
  modified_base 1: mod_base = OTHER; note = 2'-O-methyluridine-3'-phosphorothioate
  modified_base 2: mod_base = OTHER; note = 2'-fluorouridine-3'-phosphorothioate
  modified_base 3: mod_base = OTHER; note = 2'-O-methylcytidine-3'-phosphate
  modified_base 4: mod_base = OTHER; note = 2'-fluoroadenosine-3'-phosphate
  modified_base 5: mod_base = OTHER; note = 2'-O-methyladenosine-3'-phosphate
  modified_base 6: mod_base = OTHER; note = 2'-fluoroguanosine-3'-phosphate
  modified_base 7: mod_base = OTHER; note = 2'-O-methyluridine-3'-phosphate
  modified_base 8: mod_base = OTHER; note = 2'-fluorouridine-3'-phosphate
  modified_base 9: mod_base = OTHER; note = 2'-O-methyladenosine-3'-phosphate
  modified_base 10: mod_base = OTHER; note = 2'-fluorocytidine-3'-phosphate
  modified_base 11: mod_base = OTHER; note = 2'-O-methyladenosine-3'-phosphate
  modified_base 12: mod_base = OTHER; note = 2'-O-methyladenosine-3'-phosphate
  modified_base 13: mod_base = OTHER; note = 2'-O-methyladenosine-3'-phosphate
  modified_base 14: mod_base = OTHER; note = 2'-fluoroadenosine-3'-phosphate
  modified_base 15: mod_base = OTHER; note = 2'-O-methylguanosine-3'-phosphate
  modified_base 16: mod_base = OTHER; note = 2'-fluorocytidine-3'-phosphate
  modified_base 17: mod_base = OTHER; note = 2'-O-methyladenosine-3'-phosphate
  modified_base 18: mod_base = OTHER; note = 2'-fluoroadenosine-3'-phosphate
  modified_base 19: mod_base = OTHER; note = 2'-O-methyladenosine-3'-phosphate
  modified_base 20: mod_base = OTHER; note = 2'-fluoroadenosine-3'-phosphate
  modified_base 21: mod_base = OTHER; note = 2'-O-methylcytidine-3'-phosphorothioate
  modified_base 22: mod_base = OTHER; note = 2'-O-methyluridine-3'-phosphorothioate
  modified_base 23: mod_base = OTHER; note = 2'-O-methyluridine
ttcaagttacaaaagcaaaactt

SEQ ID NO: 2359 - RNA, 21 nt, synthetic construct
  source 1..21: mol_type = other RNA
  modified_base 1: mod_base = OTHER; note = 2'-O-methylguanosine-3'-phosphorothioate
  modified_base 2: mod_base = OTHER; note = 2'-O-methyluridine-3'-phosphorothioate
  modified_base 3: mod_base = OTHER; note = 2'-O-methyluridine-3'-phosphate
  modified_base 4: mod_base = OTHER; note = 2'-O-methyluridine-3'-phosphate
  modified_base 5: mod_base = OTHER; note = 2'-O-methyluridine-3'-phosphate
  modified_base 6: mod_base = OTHER; note = 2'-O-methylguanosine-3'-phosphate
  modified_base 7: mod_base = OTHER; note = 2'-fluorocytidine-3'-phosphate
  modified_base 8: mod_base = OTHER; note = 2'-fluorouridine-3'-phosphate
  modified_base 9: mod_base = OTHER; note = 2'-fluorouridine-3'-phosphate
  modified_base 10: mod_base = OTHER; note = 2'-O-methyluridine-3'-phosphate
  modified_base 11: mod_base = OTHER; note = 2'-O-methyluridine-3'-phosphate
  modified_base 12: mod_base = OTHER; note = 2'-O-methylguanosine-3'-phosphate
  modified_base 13: mod_base = OTHER; note = 2'-O-methyluridine-3'-phosphate
  modified_base 14: mod_base = OTHER; note = 2'-O-methyladenosine-3'-phosphate
  modified_base 15: mod_base = OTHER; note = 2'-O-methyladenosine-3'-phosphate
  modified_base 16: mod_base = OTHER; note = 2'-O-methylcytidine-3'-phosphate
  modified_base 17: mod_base = OTHER; note = 2'-O-methyluridine-3'-phosphate
  modified_base 18: mod_base = OTHER; note = 2'-O-methyluridine-3'-phosphate
  modified_base 19: mod_base = OTHER; note = 2'-O-methylguanosine-3'-phosphate
  modified_base 20: mod_base = OTHER; note = 2'-O-methyladenosine-3'-phosphate
  modified_base 21: mod_base = OTHER; note = 2'-O-methyladenosine
gttttgcttttgtaacttgaa

SEQ ID NO: 2360 - RNA, 23 nt, synthetic construct
  source 1..23: mol_type = other RNA
  modified_base 1: mod_base = OTHER; note = 2'-O-methyluridine-3'-phosphorothioate
  modified_base 2: mod_base = OTHER; note = 2'-fluorouridine-3'-phosphorothioate
  modified_base 3: mod_base = OTHER; note = 2'-O-methylcytidine-3'-phosphate
  modified_base 4: mod_base = OTHER; note = 2'-O-methyladenosine-3'-phosphate
  modified_base 5: mod_base = OTHER; note = 2'-O-methyladenosine-3'-phosphate
  modified_base 6: mod_base = OTHER; note = 2'-O-methylguanosine-3'-phosphate
  modified_base 7: mod_base = OTHER; note = 2'-O-methyluridine-3'-phosphate
  modified_base 8: mod_base = OTHER; note = 2'-fluorouridine-3'-phosphate
  modified_base 9: mod_base = OTHER; note = 2'-O-methyladenosine-3'-phosphate
  modified_base 10: mod_base = OTHER; note = 2'-O-methylcytidine-3'-phosphate
  modified_base 11: mod_base = OTHER; note = 2'-O-methyladenosine-3'-phosphate
  modified_base 12: mod_base = OTHER; note = 2'-O-methyladenosine-3'-phosphate
  modified_base 13: mod_base = OTHER; note = 2'-O-methyladenosine-3'-phosphate
  modified_base 14: mod_base = OTHER; note = 2'-O-methyladenosine-3'-phosphate
  modified_base 15: mod_base = OTHER; note = 2'-O-methylguanosine-3'-phosphate
  modified_base 16: mod_base = OTHER; note = 2'-fluorocytidine-3'-phosphate
  modified_base 17: mod_base = OTHER; note = 2'-O-methyladenosine-3'-phosphate
  modified_base 18: mod_base = OTHER; note = 2'-fluoroadenosine-3'-phosphate
  modified_base 19: mod_base = OTHER; note = 2'-O-methyladenosine-3'-phosphate
  modified_base 20: mod_base = OTHER; note = 2'-O-methyladenosine-3'-phosphate
  modified_base 21: mod_base = OTHER; note = 2'-O-methylcytidine-3'-phosphorothioate
  modified_base 22: mod_base = OTHER; note = 2'-O-methyluridine-3'-phosphorothioate
  modified_base 23: mod_base = OTHER; note = 2'-O-methyluridine
ttcaagttacaaaagcaaaactt

SEQ ID NO: 2361 - RNA, 19 nt, synthetic construct
  source 1..19: mol_type = other RNA
tttgcttttgtaacttgaa

SEQ ID NO: 2362 - RNA, 21 nt, synthetic construct
  source 1..21: mol_type = other RNA
ttcaagttacaaaagcaaatt

SEQ ID NO: 2363 - RNA, 19 nt, synthetic construct
  source 1..19: mol_type = other RNA
  modified_base 1: mod_base = OTHER; note = 2'-O-methyluridine-3'-phosphorothioate
  modified_base 2: mod_base = OTHER; note = 2'-O-methyluridine-3'-phosphorothioate
  modified_base 3: mod_base = OTHER; note = 2'-O-methyluridine-3'-phosphate
  modified_base 4: mod_base = OTHER; note = 2'-O-methylguanosine-3'-phosphate
  modified_base 5: mod_base = OTHER; note = 2'-O-methylcytidine-3'-phosphate
  modified_base 6: mod_base = OTHER; note = 2'-O-methyluridine-3'-phosphate
  modified_base 7: mod_base = OTHER; note = 2'-fluorouridine-3'-phosphate
  modified_base 8: mod_base = OTHER; note = 2'-O-methyluridine-3'-phosphate
  modified_base 9: mod_base = OTHER; note = 2'-fluorouridine-3'-phosphate
  modified_base 10: mod_base = OTHER; note = 2'-O-methylguanosine-3'-phosphate
  modified_base 11: mod_base = OTHER; note = 2'-O-methyluridine-3'-phosphate
  modified_base 12: mod_base = OTHER; note = 2'-O-methyladenosine-3'-phosphate
  modified_base 13: mod_base = OTHER; note = 2'-O-methyladenosine-3'-phosphate
  modified_base 14: mod_base = OTHER; note = 2'-O-methylcytidine-3'-phosphate
  modified_base 15: mod_base = OTHER; note = 2'-O-methyluridine-3'-phosphate
  modified_base 16: mod_base = OTHER; note = 2'-O-methyluridine-3'-phosphate
  modified_base 17: mod_base = OTHER; note = 2'-O-methylguanosine-3'-phosphate
  modified_base 18: mod_base = OTHER; note = 2'-O-methyladenosine-3'-phosphate
  modified_base 19: mod_base = OTHER; note = 2'-O-methyladenosine
tttgcttttgtaacttgaa

SEQ ID NO: 2364 - RNA, 21 nt, synthetic construct
  source 1..21: mol_type = other RNA
  modified_base 1: mod_base = OTHER; note = 2'-O-methyluridine-3'-phosphorothioate
  modified_base 2: mod_base = OTHER; note = 2'-fluorouridine-3'-phosphorothioate
  modified_base 3: mod_base = OTHER; note = 2'-O-methylcytidine-3'-phosphate
  modified_base 4: mod_base = OTHER; note = 2'-fluoroadenosine-3'-phosphate
  modified_base 5: mod_base = OTHER; note = 2'-fluoroadenosine-3'-phosphate
  modified_base 6: mod_base = OTHER; note = 2'-fluoroguanosine-3'-phosphate
  modified_base 7: mod_base = OTHER; note = 2'-O-methyluridine-3'-phosphate
  modified_base 8: mod_base = OTHER; note = 2'-fluorouridine-3'-phosphate
  modified_base 9: mod_base = OTHER; note = 2'-O-methyladenosine-3'-phosphate
  modified_base 10: mod_base = OTHER; note = 2'-fluorocytidine-3'-phosphate
  modified_base 11: mod_base = OTHER; note = 2'-O-methyladenosine-3'-phosphate
  modified_base 12: mod_base = OTHER; note = 2'-fluoroadenosine-3'-phosphate
  modified_base 13: mod_base = OTHER; note = 2'-O-methyladenosine-3'-phosphate
  modified_base 14: mod_base = OTHER; note = 2'-fluoroadenosine-3'-phosphate
  modified_base 15: mod_base = OTHER; note = 2'-O-methylguanosine-3'-phosphate
  modified_base 16: mod_base = OTHER; note = 2'-fluorocytidine-3'-phosphate
  modified_base 17: mod_base = OTHER; note = 2'-O-methyladenosine-3'-phosphate
  modified_base 18: mod_base = OTHER; note = 2'-fluoroadenosine-3'-phosphate
  modified_base 19: mod_base = OTHER; note = 2'-O-methyladenosine-3'-phosphorothioate
  modified_base 20: mod_base = OTHER; note = 2'-O-methyluridine-3'-phosphorothioate
  modified_base 21: mod_base = OTHER; note = 2'-O-methyluridine
ttcaagttacaaaagcaaatt

SEQ ID NO: 2365 - RNA, 19 nt, synthetic construct
  source 1..19: mol_type = other RNA
  modified_base 1: mod_base = OTHER; note = 2'-O-methyluridine-3'-phosphorothioate
  modified_base 2: mod_base = OTHER; note = 2'-O-methyluridine-3'-phosphorothioate
  modified_base 3: mod_base = OTHER; note = 2'-O-methyluridine-3'-phosphate
  modified_base 4: mod_base = OTHER; note = 2'-O-methylguanosine-3'-phosphate
  modified_base 5: mod_base = OTHER; note = 2'-O-methylcytidine-3'-phosphate
  modified_base 6: mod_base = OTHER; note = 2'-O-methyluridine-3'-phosphate
  modified_base 7: mod_base = OTHER; note = 2'-fluorouridine-3'-phosphate
  modified_base 8: mod_base = OTHER; note = 2'-O-methyluridine-3'-phosphate
  modified_base 9: mod_base = OTHER; note = 2'-fluorouridine-3'-phosphate
  modified_base 10: mod_base = OTHER; note = 2'-fluoroguanosine-3'-phosphate
  modified_base 11: mod_base = OTHER; note = 2'-fluorouridine-3'-phosphate
  modified_base 12: mod_base = OTHER; note = 2'-O-methyladenosine-3'-phosphate
  modified_base 13: mod_base = OTHER; note = 2'-O-methyladenosine-3'-phosphate
  modified_base 14: mod_base = OTHER; note = 2'-O-methylcytidine-3'-phosphate
  modified_base 15: mod_base = OTHER; note = 2'-O-methyluridine-3'-phosphate
  modified_base 16: mod_base = OTHER; note = 2'-O-methyluridine-3'-phosphate
  modified_base 17: mod_base = OTHER; note = 2'-O-methylguanosine-3'-phosphate
  modified_base 18: mod_base = OTHER; note = 2'-O-methyladenosine-3'-phosphate
  modified_base 19: mod_base = OTHER; note = 2'-O-methyladenosine
tttgcttttgtaacttgaa

SEQ ID NO: 2366 - RNA, 21 nt, synthetic construct
  source 1..21: mol_type = other RNA
  modified_base 1: mod_base = OTHER; note = 2'-O-methyluridine-3'-phosphorothioate
  modified_base 2: mod_base = OTHER; note = 2'-fluorouridine-3'-phosphorothioate
  modified_base 3: mod_base = OTHER; note = 2'-O-methylcytidine-3'-phosphate
  modified_base 4: mod_base = OTHER; note = 2'-O-methyladenosine-3'-phosphate
  modified_base 5: mod_base = OTHER; note = 2'-O-methyladenosine-3'-phosphate
  modified_base 6: mod_base = OTHER; note = 2'-fluoroguanosine-3'-phosphate
  modified_base 7: mod_base = OTHER; note = 2'-O-methyluridine-3'-phosphate
  modified_base 8: mod_base = OTHER; note = 2'-fluorouridine-3'-phosphate
  modified_base 9: mod_base = OTHER; note = 2'-O-methyladenosine-3'-phosphate
  modified_base 10: mod_base = OTHER; note = 2'-O-methylcytidine-3'-phosphate
  modified_base 11: mod_base = OTHER; note = 2'-O-methyladenosine-3'-phosphate
  modified_base 12: mod_base = OTHER; note = 2'-fluoroadenosine-3'-phosphate
  modified_base 13: mod_base = OTHER; note = 2'-O-methyladenosine-3'-phosphate
  modified_base 14: mod_base = OTHER; note = 2'-fluoroadenosine-3'-phosphate
  modified_base 15: mod_base = OTHER; note = 2'-O-methylguanosine-3'-phosphate
  modified_base 16: mod_base = OTHER; note = 2'-fluorocytidine-3'-phosphate
  modified_base 17: mod_base = OTHER; note = 2'-O-methyladenosine-3'-phosphate
  modified_base 18: mod_base = OTHER; note = 2'-fluoroadenosine-3'-phosphate
  modified_base 19: mod_base = OTHER; note = 2'-O-methyladenosine-3'-phosphorothioate
  modified_base 20: mod_base = OTHER; note = 2'-O-methyluridine-3'-phosphorothioate
  modified_base 21: mod_base = OTHER; note = 2'-O-methyluridine
ttcaagttacaaaagcaaatt

SEQ ID NO: 2367 - RNA, 18 nt, synthetic construct
  source 1..18: mol_type = other RNA
cctcataggcctggagtt

SEQ ID NO: 2368 - RNA, 18 nt, synthetic construct
  source 1..18: mol_type = other RNA
aactccaggcctatgagg

SEQ ID NO: 2369 - DNA, 22 bp, synthetic construct
  source 1..22: mol_type = other DNA
  modified_base 1: mod_base = OTHER; note = Cytosine-3'-phosphorothioate
  modified_base 2: mod_base = OTHER; note = Cytosine-3'-phosphorothioate
  modified_base 13: mod_base = OTHER; note = 2'-O-methylguanosine-3'-phosphate
  modified_base 14: mod_base = OTHER; note = 2'-O-methylguanosine-3'-phosphate
  modified_base 15: mod_base = OTHER; note = 2'-O-methyladenosine-3'-phosphate
  modified_base 16: mod_base = OTHER; note = 2'-O-methylguanosine-3'-phosphate
  modified_base 17: mod_base = OTHER; note = 2'-O-methyluridine-3'-phosphate
  modified_base 18: mod_base = OTHER; note = 2'-O-methyluridine-3'-phosphate
  modified_base 19: mod_base = OTHER; note = 2'-O-methyluridine-3'-phosphate
  modified_base 20: mod_base = OTHER; note = 2'-O-methyladenosine-3'-phosphorothioate
  modified_base 21: mod_base = OTHER; note = 2'-deoxythymidine(or 5-methyluridine)-3'-phosphorothioate
  misc_feature 1..11: note = RNA
  misc_feature 12: note = DNA
  misc_feature 13..20: note = RNA
  misc_feature 21..22: note = DNA
cctcataggcctggagtttatt

SEQ ID NO: 2370 - DNA, 22 bp, synthetic construct
  source 1..22: mol_type = other DNA
  modified_base 1: mod_base = OTHER; note = 2'-O-methyladenosine-3'-phosphorothioate
  modified_base 2: mod_base = OTHER; note = 2'-O-methyladenosine-3'-phosphorothioate
  modified_base 3: mod_base = OTHER; note = 2'-O-methylcytidine-3'-phosphate
  modified_base 4: mod_base = OTHER; note = 2'-O-methyluridine-3'-phosphate
  modified_base 5: mod_base = OTHER; note = 2'-O-methylcytidine-3'-phosphate
  modified_base 6: mod_base = OTHER; note = 2'-O-methylcytidine-3'-phosphate
  modified_base 20: mod_base = OTHER; note = Uridine-3'-phosphorothioate
  modified_base 21: mod_base = OTHER; note = 2'-deoxythymidine(or 5-methyluridine)-3'-phosphorothioate
  misc_feature 1..20: note = RNA
  misc_feature 21..22: note = DNA
aactccaggcctatgagggttt

SEQ ID NO: 2371 - DNA, 22 bp, synthetic construct
  source 1..22: mol_type = other DNA
  modified_base 1: mod_base = OTHER; note = 2'-O-methylcytidine-3'-phosphate
  modified_base 2: mod_base = OTHER; note = 2'-O-methylcytidine-3'-phosphate
  modified_base 3: mod_base = OTHER; note = 2'-O-methyluridine-3'-phosphate
  modified_base 4: mod_base = OTHER; note = 2'-O-methylcytidine-3'-phosphate
  modified_base 5: mod_base = OTHER; note = 2'-O-methyladenosine-3'-phosphate
  modified_base 6: mod_base = OTHER; note = 2'-O-methyluridine-3'-phosphate
  modified_base 7: mod_base = OTHER; note = 2'-O-methyladenosine-3'-phosphate
  modified_base 8: mod_base = OTHER; note = 2'-O-methylguanosine-3'-phosphate
  modified_base 9: mod_base = OTHER; note = 2'-O-methylguanosine-3'-phosphate
  modified_base 10: mod_base = OTHER; note = 2'-O-methylcytidine-3'-phosphate
  modified_base 11: mod_base = OTHER; note = 2'-O-methylcytidine-3'-phosphate
  modified_base 13: mod_base = OTHER; note = 2'-O-methylguanosine-3'-phosphate
  modified_base 14: mod_base = OTHER; note = 2'-O-methylguanosine-3'-phosphate
  modified_base 15: mod_base = OTHER; note = 2'-O-methyladenosine-3'-phosphate
  modified_base 16: mod_base = OTHER; note = 2'-O-methylguanosine-3'-phosphate
  modified_base 17: mod_base = OTHER; note = 2'-O-methyluridine-3'-phosphate
  modified_base 18: mod_base = OTHER; note = 2'-O-methyluridine-3'-phosphate
  modified_base 19: mod_base = OTHER; note = 2'-O-methyluridine-3'-phosphate
  modified_base 20: mod_base = OTHER; note = 2'-O-methyladenosine-3'-phosphorothioate
  modified_base 21: mod_base = OTHER; note = 2'-deoxythymidine(or 5-methyluridine)-3'-phosphorothioate
  misc_feature 1..11: note = RNA
  misc_feature 12: note = DNA
  misc_feature 13..20: note = RNA
  misc_feature 21..22: note = DNA
cctcataggcctggagtttatt

SEQ ID NO: 2372 - DNA, 22 bp, synthetic construct
  source 1..22: mol_type = other DNA
  modified_base 1: mod_base = OTHER; note = 2'-O-methyladenosine-3'-phosphate
  modified_base 2: mod_base = OTHER; note = 2'-O-methyladenosine-3'-phosphate
  modified_base 3: mod_base = OTHER; note = 2'-O-methylcytidine-3'-phosphate
  modified_base 4: mod_base = OTHER; note = 2'-O-methyluridine-3'-phosphate
  modified_base 5: mod_base = OTHER; note = 2'-O-methylcytidine-3'-phosphate
  modified_base 6: mod_base = OTHER; note = 2'-O-methylcytidine-3'-phosphate
  modified_base 7: mod_base = OTHER; note = 2'-O-methyladenosine-3'-phosphate
  modified_base 8: mod_base = OTHER; note = 2'-O-methylguanosine-3'-phosphate
  modified_base 9: mod_base = OTHER; note = 2'-O-methylguanosine-3'-phosphate
  modified_base 10: mod_base = OTHER; note = 2'-O-methylcytidine-3'-phosphate
  modified_base 11: mod_base = OTHER; note = 2'-O-methylcytidine-3'-phosphate
  modified_base 12: mod_base = OTHER; note = 2'-O-methyluridine-3'-phosphate
  modified_base 13: mod_base = OTHER; note = 2'-O-methyladenosine-3'-phosphate
  modified_base 14: mod_base = OTHER; note = 2'-O-methyluridine-3'-phosphate
  modified_base 15: mod_base = OTHER; note = 2'-O-methylguanosine-3'-phosphate
  modified_base 16: mod_base = OTHER; note = 2'-O-methyladenosine-3'-phosphate
  modified_base 17: mod_base = OTHER; note = 2'-O-methylguanosine-3'-phosphate
  modified_base 18: mod_base = OTHER; note = 2'-O-methylguanosine-3'-phosphate
  modified_base 19: mod_base = OTHER; note = 2'-O-methylguanosine-3'-phosphate
  modified_base 20: mod_base = OTHER; note = 2'-O-methyluridine-3'-phosphate
  modified_base 21: mod_base = OTHER; note = 2'-deoxythymidine(or 5-methyluridine)-3'-phosphorothioate
  misc_feature 1..20: note = RNA
  misc_feature 21..22: note = DNA
aactccaggcctatgagggttt

SEQ ID NO: 2373 - RNA, 19 nt, synthetic construct
  source 1..19: mol_type = other RNA
  modified_base 1: mod_base = OTHER; note = 2'-O-methylguanosine-3'-phosphate
  modified_base 2: mod_base = OTHER; note = 2'-O-methylcytidine-3'-phosphate
  modified_base 3: mod_base = OTHER; note = 2'-O-methylcytidine-3'-phosphate
  modified_base 4: mod_base = OTHER; note = 2'-O-methyluridine-3'-phosphate
  modified_base 5: mod_base = OTHER; note = 2'-O-methylguanosine-3'-phosphate
  modified_base 6: mod_base = OTHER; note = 2'-O-methylguanosine-3'-phosphate
  modified_base 7: mod_base = OTHER; note = 2'-fluoroadenosine-3'-phosphate
  modified_base 8: mod_base = OTHER; note = 2'-fluoroguanosine-3'-phosphate
  modified_base 9: mod_base = OTHER; note = 2'-fluorouridine-3'-phosphate
  modified_base 10: mod_base = OTHER; note = 2'-O-methyluridine-3'-phosphate
  modified_base 11: mod_base = OTHER; note = 2'-O-methyluridine-3'-phosphate
  modified_base 12: mod_base = OTHER; note = 2'-O-methyladenosine-3'-phosphate
  modified_base 13: mod_base = OTHER; note = 2'-O-methyluridine-3'-phosphate
  modified_base 14: mod_base = OTHER; note = 2'-O-methyluridine-3'-phosphate
  modified_base 15: mod_base = OTHER; note = 2'-O-methylcytidine-3'-phosphate
  modified_base 16: mod_base = OTHER; note = 2'-O-methylguanosine-3'-phosphate
  modified_base 17: mod_base = OTHER; note = 2'-O-methylguanosine-3'-phosphate
  modified_base 18: mod_base = OTHER; note = 2'-O-methyladenosine-3'-phosphate
  modified_base 19: mod_base = OTHER; note = 2'-O-methyladenosine
gcctggagtttattcggaa

SEQ ID NO: 2374 - RNA, 19 nt, synthetic construct
  source 1..19: mol_type = other RNA
  modified_base 1: mod_base = OTHER; note = 2'-O-methyluridine-3'-phosphate
  modified_base 2: mod_base = OTHER; note = 2'-fluorouridine-3'-phosphate
  modified_base 3: mod_base = OTHER; note = 2'-O-methylcytidine-3'-phosphate
  modified_base 4: mod_base = OTHER; note = 2'-O-methylcytidine-3'-phosphate
  modified_base 5: mod_base = OTHER; note = 2'-O-methylguanosine-3'-phosphate
  modified_base 6: mod_base = OTHER; note = 2'-O-methyladenosine-3'-phosphate
  modified_base 7: mod_base = OTHER; note = 2'-O-methyladenosine-3'-phosphate
  modified_base 8: mod_base = OTHER; note = 2'-O-methyluridine-3'-phosphate
  modified_base 9: mod_base = OTHER; note = 2'-O-methyladenosine-3'-phosphate
  modified_base 10: mod_base = OTHER; note = 2'-O-methyladenosine-3'-phosphate
  modified_base 11: mod_base = OTHER; note = 2'-O-methyladenosine-3'-phosphate
  modified_base 12: mod_base = OTHER; note = 2'-O-methylcytidine-3'-phosphate
  modified_base 13: mod_base = OTHER; note = 2'-O-methyluridine-3'-phosphate
  modified_base 14: mod_base = OTHER; note = 2'-fluorocytidine-3'-phosphate
  modified_base 15: mod_base = OTHER; note = 2'-O-methylcytidine-3'-phosphate
  modified_base 16: mod_base = OTHER; note = 2'-O-methyladenosine-3'-phosphate
  modified_base 17: mod_base = OTHER; note = 2'-O-methylguanosine-3'-phosphate
  modified_base 18: mod_base = OTHER; note = 2'-O-methylguanosine-3'-phosphate
  modified_base 19: mod_base = OTHER; note = 2'-O-methylcytidine
ttccgaataaactccaggc

SEQ ID NO: 2375 - RNA, 19 nt, synthetic construct
  source 1..19: mol_type = other RNA
  modified_base 1: mod_base = OTHER; note = 2'-O-methylcytidine-3'-phosphate
  modified_base 2: mod_base = OTHER; note = 2'-O-methylcytidine-3'-phosphate
  modified_base 3: mod_base = OTHER; note = 2'-O-methylcytidine-3'-phosphate
  modified_base 4: mod_base = OTHER; note = 2'-O-methyluridine-3'-phosphate
  modified_base 5: mod_base = OTHER; note = 2'-O-methylcytidine-3'-phosphate
  modified_base 6: mod_base = OTHER; note = 2'-O-methyladenosine-3'-phosphate
  modified_base 7: mod_base = OTHER; note = 2'-fluorouridine-3'-phosphate
  modified_base 8: mod_base = OTHER; note = 2'-fluoroadenosine-3'-phosphate
  modified_base 9: mod_base = OTHER; note = 2'-fluoroguanosine-3'-phosphate
  modified_base 10: mod_base = OTHER; note = 2'-O-methylguanosine-3'-phosphate
  modified_base 11: mod_base = OTHER; note = 2'-O-methylcytidine-3'-phosphate
  modified_base 12: mod_base = OTHER; note = 2'-O-methylcytidine-3'-phosphate
  modified_base 13: mod_base = OTHER; note = 2'-O-methyluridine-3'-phosphate
  modified_base 14: mod_base = OTHER; note = 2'-O-methylguanosine-3'-phosphate
  modified_base 15: mod_base = OTHER; note = 2'-O-methylguanosine-3'-phosphate
  modified_base 16: mod_base = OTHER; note = 2'-O-methyladenosine-3'-phosphate
  modified_base 17: mod_base = OTHER; note = 2'-O-methylguanosine-3'-phosphate
  modified_base 18: mod_base = OTHER; note = 2'-O-methyluridine-3'-phosphate
  modified_base 19: mod_base = OTHER; note = 2'-O-methyluridine
ccctcataggcctggagtt

SEQ ID NO: 2376 - RNA, 21 nt, synthetic construct
  source 1..21: mol_type = other RNA
  modified_base 1: mod_base = OTHER; note = 2'-O-methyladenosine-3'-phosphate
  modified_base 2: mod_base = OTHER; note = 2'-fluoroadenosine-3'-phosphate
  modified_base 3: mod_base = OTHER; note = 2'-O-methylcytidine-3'-phosphate
  modified_base 4: mod_base = OTHER; note = 2'-O-methyluridine-3'-phosphate
  modified_base 5: mod_base = OTHER; note = 2'-O-methylcytidine-3'-phosphate
  modified_base 6: mod_base = OTHER; note = 2'-O-methylcytidine-3'-phosphate
  modified_base 7: mod_base = OTHER; note = 2'-O-methyladenosine-3'-phosphate
  modified_base 8: mod_base = OTHER; note = 2'-O-methylguanosine-3'-phosphate
  modified_base 9: mod_base = OTHER; note = 2'-O-methylguanosine-3'-phosphate
  modified_base 10: mod_base = OTHER; note = 2'-O-methylcytidine-3'-phosphate
  modified_base 11: mod_base = OTHER; note = 2'-O-methylcytidine-3'-phosphate
  modified_base 12: mod_base = OTHER; note = 2'-O-methyluridine-3'-phosphate
  modified_base 13: mod_base = OTHER; note = 2'-O-methyladenosine-3'-phosphate
  modified_base 14: mod_base = OTHER; note = 2'-fluorouridine-3'-phosphate
  modified_base 15: mod_base = OTHER; note = 2'-O-methylguanosine-3'-phosphate
  modified_base 16: mod_base = OTHER; note = 2'-O-methyladenosine-3'-phosphate
  modified_base 17: mod_base = OTHER; note = 2'-O-methylguanosine-3'-phosphate
  modified_base 18: mod_base = OTHER; note = 2'-O-methylguanosine-3'-phosphate
  modified_base 19: mod_base = OTHER; note = 2'-O-methylguanosine-3'-phosphate
  modified_base 20: mod_base = OTHER; note = 2'-O-methyluridine-3'-phosphate
  modified_base 21: mod_base = OTHER; note = 2'-O-methylguanosine
aactccaggcctatgagggtg

SEQ ID NO: 2377 - RNA, 19 nt, synthetic construct
  source 1..19: mol_type = other RNA
  modified_base 1: mod_base = OTHER; note = 2'-O-methylguanosine-3'-phosphate
  modified_base 2: mod_base = OTHER; note = 2'-O-methylcytidine-3'-phosphate
  modified_base 3: mod_base = OTHER; note = 2'-O-methyladenosine-3'-phosphate
  modified_base 4: mod_base = OTHER; note = 2'-O-methylcytidine-3'-phosphate
  modified_base 5: mod_base = OTHER; note = 2'-O-methylcytidine-3'-phosphate
  modified_base 6: mod_base = OTHER; note = 2'-O-methylcytidine-3'-phosphate
  modified_base 7: mod_base = OTHER; note = 2'-fluorouridine-3'-phosphate
  modified_base 8: mod_base = OTHER; note = 2'-fluorocytidine-3'-phosphate
  modified_base 9: mod_base = OTHER; note = 2'-fluoroadenosine-3'-phosphate
  modified_base 10: mod_base = OTHER; note = 2'-O-methyluridine-3'-phosphate
  modified_base 11: mod_base = OTHER; note = 2'-O-methyladenosine-3'-phosphate
  modified_base 12: mod_base = OTHER; note = 2'-O-methylguanosine-3'-phosphate
  modified_base 13: mod_base = OTHER; note = 2'-O-methylguanosine-3'-phosphate
  modified_base 14: mod_base = OTHER; note = 2'-O-methylcytidine-3'-phosphate
  modified_base 15: mod_base = OTHER; note = 2'-O-methylcytidine-3'-phosphate
  modified_base 16: mod_base = OTHER; note = 2'-O-methyluridine-3'-phosphate
  modified_base 17: mod_base = OTHER; note = 2'-O-methylguanosine-3'-phosphate
  modified_base 18: mod_base = OTHER; note = 2'-O-methylguanosine-3'-phosphate
  modified_base 19: mod_base = OTHER; note = 2'-O-methyladenosine
gcaccctcataggcctgga

SEQ ID NO: 2378 - RNA, 21 nt, synthetic construct
  source 1..21: mol_type = other RNA
  modified_base 1: mod_base = OTHER; note = 2'-O-methyluridine-3'-phosphate
  modified_base 2: mod_base = OTHER; note = 2'-fluorocytidine-3'-phosphate
  modified_base 3: mod_base = OTHER; note = 2'-O-methylcytidine-3'-phosphate
  modified_base 4: mod_base = OTHER; note = 2'-O-methyladenosine-3'-phosphate
  modified_base 5: mod_base = OTHER; note = 2'-O-methylguanosine-3'-phosphate
  modified_base 6: mod_base = OTHER; note = 2'-O-methylguanosine-3'-phosphate
  modified_base 7: mod_base = OTHER; note = 2'-O-methylcytidine-3'-phosphate
  modified_base 8: mod_base = OTHER; note = 2'-O-methylcytidine-3'-phosphate
  modified_base 9: mod_base = OTHER; note = 2'-O-methyluridine-3'-phosphate
  modified_base 10: mod_base = OTHER; note = 2'-O-methyladenosine-3'-phosphate
  modified_base 11: mod_base = OTHER; note = 2'-O-methyluridine-3'-phosphate
  modified_base 12: mod_base = OTHER; note = 2'-O-methylguanosine-3'-phosphate
  modified_base 13: mod_base = OTHER; note = 2'-O-methyladenosine-3'-phosphate
  modified_base 14: mod_base = OTHER; note = 2'-fluoroguanosine-3'-phosphate
  modified_base 15: mod_base = OTHER; note = 2'-O-methylguanosine-3'-phosphate
  modified_base 16: mod_base = OTHER; note = 2'-O-methylguanosine-3'-phosphate
  modified_base 17: mod_base = OTHER; note = 2'-O-methyluridine-3'-phosphate
  modified_base 18: mod_base = OTHER; note = 2'-O-methylguanosine-3'-phosphate
  modified_base 19: mod_base = OTHER; note = 2'-O-methylcytidine-3'-phosphate
  modified_base 20: mod_base = OTHER; note = 2'-O-methylcytidine-3'-phosphate
  modified_base 21: mod_base = OTHER; note = 2'-O-methylguanosine
tccaggcctatgagggtgccg

SEQ ID NO: 2379 - RNA, 21 nt, synthetic construct
  source 1..21: mol_type = other RNA
  modified_base 1: mod_base = OTHER; note = 2'-O-methylcytidine-3'-phosphate
  modified_base 2: mod_base = OTHER; note = 2'-O-methyladenosine-3'-phosphate
  modified_base 3: mod_base = OTHER; note = 2'-O-methylcytidine-3'-phosphate
  modified_base 4: mod_base = OTHER; note = 2'-O-methylcytidine-3'-phosphate
  modified_base 5: mod_base = OTHER; note = 2'-O-methylcytidine-3'-phosphate
  modified_base 6: mod_base = OTHER; note = 2'-O-methyluridine-3'-phosphate
  modified_base 7: mod_base = OTHER; note = 2'-O-methylcytidine-3'-phosphate
  modified_base 8: mod_base = OTHER; note = 2'-O-methyladenosine-3'-phosphate
  modified_base 9: mod_base = OTHER; note = 2'-fluorouridine-3'-phosphate
  modified_base 10: mod_base = OTHER; note = 2'-fluoroadenosine-3'-phosphate
  modified_base 11: mod_base = OTHER; note = 2'-fluoroguanosine-3'-phosphate
  modified_base 12: mod_base = OTHER; note = 2'-O-methylguanosine-3'-phosphate
  modified_base 13: mod_base = OTHER; note = 2'-O-methylcytidine-3'-phosphate
  modified_base 14: mod_base = OTHER; note = 2'-O-methylcytidine-3'-phosphate
  modified_base 15: mod_base = OTHER; note = 2'-O-methyluridine-3'-phosphate
  modified_base 16: mod_base = OTHER; note = 2'-O-methylguanosine-3'-phosphate
  modified_base 17: mod_base = OTHER; note = 2'-O-methylguanosine-3'-phosphate
  modified_base 18: mod_base = OTHER; note = 2'-O-methyladenosine-3'-phosphate
  modified_base 19: mod_base = OTHER; note = 2'-O-methylguanosine-3'-phosphate
  modified_base 20: mod_base = OTHER; note = 2'-O-methyluridine-3'-phosphate
  modified_base 21: mod_base = OTHER; note = 2'-O-methyluridine
caccctcataggcctggagtt

SEQ ID NO: 2380 - RNA, 23 nt, synthetic construct
  source 1..23: mol_type = other RNA
  modified_base 1: mod_base = OTHER; note = 2'-O-methyladenosine-3'-phosphate
  modified_base 2: mod_base = OTHER; note = 2'-fluoroadenosine-3'-phosphate
  modified_base 3: mod_base = OTHER; note = 2'-O-methylcytidine-3'-phosphate
  modified_base 4: mod_base = OTHER; note = 2'-O-methyluridine-3'-phosphate
  modified_base 5: mod_base = OTHER; note = 2'-O-methylcytidine-3'-phosphate
  modified_base 6: mod_base = OTHER; note = 2'-O-methylcytidine-3'-phosphate
  modified_base 7: mod_base = OTHER; note = 2'-O-methyladenosine-3'-phosphate
  modified_base 8: mod_base = OTHER; note = 2'-O-methylguanosine-3'-phosphate
  modified_base 9: mod_base = OTHER; note = 2'-O-methylguanosine-3'-phosphate
  modified_base 10: mod_base = OTHER; note = 2'-O-methylcytidine-3'-phosphate
  modified_base 11: mod_base = OTHER; note = 2'-O-methylcytidine-3'-phosphate
  modified_base 12: mod_base = OTHER; note = 2'-O-methyluridine-3'-phosphate
  modified_base 13: mod_base = OTHER; note = 2'-O-methyladenosine-3'-phosphate
  modified_base 14: mod_base = OTHER; note = 2'-fluorouridine-3'-phosphate
  modified_base 15: mod_base = OTHER; note = 2'-O-methylguanosine-3'-phosphate
  modified_base 16: mod_base = OTHER; note = 2'-O-methyladenosine-3'-phosphate
  modified_base 17: mod_base = OTHER; note = 2'-O-methylguanosine-3'-phosphate
  modified_base 18: mod_base = OTHER; note = 2'-O-methylguanosine-3'-phosphate
  modified_base 19: mod_base = OTHER; note = 2'-O-methylguanosine-3'-phosphate
  modified_base 20: mod_base = OTHER; note = 2'-O-methyluridine-3'-phosphate
  modified_base 21: mod_base = OTHER; note = 2'-O-methylguanosine-3'-phosphate
  modified_base 22: mod_base = OTHER; note = 2'-O-methylcytidine-3'-phosphate
  modified_base 23: mod_base = OTHER; note = 2'-O-methylcytidine
aactccaggcctatgagggtgcc

SEQ ID NO: 2381 - RNA, 21 nt, synthetic construct
  source 1..21: mol_type = other RNA
  modified_base 1: mod_base = OTHER; note = 2'-O-methylcytidine-3'-phosphate
  modified_base 2: mod_base = OTHER; note = 2'-O-methylguanosine-3'-phosphate
  modified_base 3: mod_base = OTHER; note = 2'-O-methylguanosine-3'-phosphate
  modified_base 4: mod_base = OTHER; note = 2'-O-methylcytidine-3'-phosphate
  modified_base 5: mod_base = OTHER; note = 2'-O-methyladenosine-3'-phosphate
  modified_base 6: mod_base = OTHER; note = 2'-O-methylcytidine-3'-phosphate
  modified_base 7: mod_base = OTHER; note = 2'-O-methylcytidine-3'-phosphate
  modified_base 8: mod_base = OTHER; note = 2'-O-methylcytidine-3'-phosphate
  modified_base 9: mod_base = OTHER; note = 2'-fluorouridine-3'-phosphate
  modified_base 10: mod_base = OTHER; note = 2'-fluorocytidine-3'-phosphate
  modified_base 11: mod_base = OTHER; note = 2'-fluoroadenosine-3'-phosphate
  modified_base 12: mod_base = OTHER; note = 2'-O-methyluridine-3'-phosphate
  modified_base 13: mod_base = OTHER; note = 2'-O-methyladenosine-3'-phosphate
  modified_base 14: mod_base = OTHER; note = 2'-O-methylguanosine-3'-phosphate
  modified_base 15: mod_base = OTHER; note = 2'-O-methylguanosine-3'-phosphate
  modified_base 16: mod_base = OTHER; note = 2'-O-methylcytidine-3'-phosphate
  modified_base 17: mod_base = OTHER; note = 2'-O-methylcytidine-3'-phosphate
  modified_base 18: mod_base = OTHER; note = 2'-O-methyluridine-3'-phosphate
  modified_base 19: mod_base = OTHER; note = 2'-O-methylguanosine-3'-phosphate
  modified_base 20: mod_base = OTHER; note = 2'-O-methylguanosine-3'-phosphate
  modified_base 21: mod_base = OTHER; note = 2'-O-methyladenosine
cggcaccctcataggcctgga

SEQ ID NO: 2382 - RNA, 23 nt, synthetic construct
  source 1..23: mol_type = other RNA
  modified_base 1: mod_base = OTHER; note = 2'-O-methyluridine-3'-phosphate
  modified_base 2: mod_base = OTHER; note = 2'-fluorocytidine-3'-phosphate
  modified_base 3: mod_base = OTHER; note = 2'-O-methylcytidine-3'-phosphate
  modified_base 4: mod_base = OTHER; note = 2'-O-methyladenosine-3'-phosphate
  modified_base 5: mod_base = OTHER; note = 2'-O-methylguanosine-3'-phosphate
  modified_base 6: mod_base = OTHER; note = 2'-O-methylguanosine-3'-phosphate
  modified_base 7: mod_base = OTHER; note = 2'-O-methylcytidine-3'-phosphate
  modified_base 8: mod_base = OTHER; note = 2'-O-methylcytidine-3'-phosphate
  modified_base 9: mod_base = OTHER; note = 2'-O-methyluridine-3'-phosphate
  modified_base 10: mod_base = OTHER; note = 2'-O-methyladenosine-3'-phosphate
  modified_base 11: mod_base = OTHER; note = 2'-O-methyluridine-3'-phosphate
  modified_base 12: mod_base = OTHER; note = 2'-O-methylguanosine-3'-phosphate
  modified_base 13: mod_base = OTHER; note = 2'-O-methyladenosine-3'-phosphate
  modified_base 14: mod_base = OTHER; note = 2'-fluoroguanosine-3'-phosphate
  modified_base 15: mod_base = OTHER; note = 2'-O-methylguanosine-3'-phosphate
  modified_base 16: mod_base = OTHER; note = 2'-O-methylguanosine-3'-phosphate
  modified_base 17: mod_base = OTHER; note = 2'-O-methyluridine-3'-phosphate
  modified_base 18: mod_base = OTHER; note = 2'-O-methylguanosine-3'-phosphate
  modified_base 19: mod_base = OTHER; note = 2'-O-methylcytidine-3'-phosphate
  modified_base 20: mod_base = OTHER; note = 2'-O-methylcytidine-3'-phosphate
  modified_base 21: mod_base = OTHER; note = 2'-O-methylguanosine-3'-phosphate
  modified_base 22: mod_base = OTHER; note = 2'-O-methylcytidine-3'-phosphate
  modified_base 23: mod_base = OTHER; note = 2'-O-methyluridine
tccaggcctatgagggtgccgct

SEQ ID NO: 2383 - RNA, 19 nt, synthetic construct
  source 1..19: mol_type = other RNA
  modified_base 1: mod_base = OTHER; note = 2'-O-methylcytidine-3'-phosphate
  modified_base 2: mod_base = OTHER; note = 2'-O-methylcytidine-3'-phosphate
  modified_base 3: mod_base = OTHER; note = 2'-O-methylcytidine-3'-phosphate
  modified_base 4: mod_base = OTHER; note = 2'-O-methyluridine-3'-phosphate
  modified_base 5: mod_base = OTHER; note = 2'-fluorocytidine-3'-phosphate
  modified_base 6: mod_base = OTHER; note = 2'-O-methyladenosine-3'-phosphate
  modified_base 7: mod_base = OTHER; note = 2'-fluorouridine-3'-phosphate
  modified_base 8: mod_base = OTHER; note = 2'-fluoroadenosine-3'-phosphate
  modified_base 9: mod_base = OTHER; note = 2'-fluoroguanosine-3'-phosphate
  modified_base 10: mod_base = OTHER; note = 2'-O-methylguanosine-3'-phosphate
  modified_base 11: mod_base = OTHER; note = 2'-O-methylcytidine-3'-phosphate
  modified_base 12: mod_base = OTHER; note = 2'-O-methylcytidine-3'-phosphate
  modified_base 13: mod_base = OTHER; note = 2'-O-methyluridine-3'-phosphate
  modified_base 14: mod_base = OTHER; note = 2'-O-methylguanosine-3'-phosphate
  modified_base 15: mod_base = OTHER; note = 2'-O-methylguanosine-3'-phosphate
  modified_base 16: mod_base = OTHER; note = 2'-O-methyladenosine-3'-phosphate
  modified_base 17: mod_base = OTHER; note = 2'-O-methylguanosine-3'-phosphate
  modified_base 18: mod_base = OTHER; note = 2'-O-methyluridine-3'-phosphate
  modified_base 19: mod_base = OTHER; note = 2'-O-methyluridine
ccctcataggcctggagtt

SEQ ID NO: 2384 - RNA, 21 nt, synthetic construct
  source 1..21: mol_type = other RNA
  modified_base 1: mod_base = OTHER; note = 2'-O-methyladenosine-3'-phosphate
  modified_base 2: mod_base = OTHER; note = 2'-fluoroadenosine-3'-phosphate
  modified_base 3: mod_base = OTHER; note = 2'-O-methylcytidine-3'-phosphate
  modified_base 4: mod_base = OTHER; note = 2'-O-methyluridine-3'-phosphate
  modified_base 5: mod_base = OTHER; note = 2'-O-methylcytidine-3'-phosphate
  modified_base 6: mod_base = OTHER; note = 2'-fluorocytidine-3'-phosphate
  modified_base 7: mod_base = OTHER; note = 2'-O-methyladenosine-3'-phosphate
  modified_base 8: mod_base = OTHER; note = 2'-fluoroguanosine-3'-phosphate
  modified_base 9: mod_base = OTHER; note = 2'-fluoroguanosine-3'-phosphate
  modified_base 10: mod_base = OTHER; note = 2'-O-methylcytidine-3'-phosphate
  modified_base 11: mod_base = OTHER; note = 2'-O-methylcytidine-3'-phosphate
  modified_base 12: mod_base = OTHER; note = 2'-O-methyluridine-3'-phosphate
  modified_base 13: mod_base = OTHER; note = 2'-O-methyladenosine-3'-phosphate
  modified_base 14: mod_base = OTHER; note = 2'-fluorouridine-3'-phosphate
  modified_base 15: mod_base = OTHER; note = 2'-O-methylguanosine-3'-phosphate
  modified_base 16: mod_base = OTHER; note = 2'-fluoroadenosine-3'-phosphate
  modified_base 17: mod_base = OTHER; note = 2'-O-methylguanosine-3'-phosphate
  modified_base 18: mod_base = OTHER; note = 2'-O-methylguanosine-3'-phosphate
  modified_base 19: mod_base = OTHER; note = 2'-O-methylguanosine-3'-phosphate
  modified_base 20: mod_base = OTHER; note = 2'-O-methyluridine-3'-phosphate
  modified_base 21: mod_base = OTHER; note = 2'-O-methylguanosine
aactccaggcctatgagggtg

SEQ ID NO: 2385 - RNA, 19 nt, synthetic construct
  source 1..19: mol_type = other RNA
  modified_base 1: mod_base = OTHER; note = 2'-O-methylguanosine-3'-phosphate
  modified_base 2: mod_base = OTHER; note = 2'-O-methylcytidine-3'-phosphate
  modified_base 3: mod_base = OTHER; note = 2'-O-methyladenosine-3'-phosphate
  modified_base 4: mod_base = OTHER; note = 2'-O-methylcytidine-3'-phosphate
  modified_base 5: mod_base = OTHER; note = 2'-fluorocytidine-3'-phosphate
  modified_base 6: mod_base = OTHER; note = 2'-O-methylcytidine-3'-phosphate
  modified_base 7: mod_base = OTHER; note = 2'-fluorouridine-3'-phosphate
  modified_base 8: mod_base = OTHER; note = 2'-fluorocytidine-3'-phosphate
  modified_base 9: mod_base = OTHER; note = 2'-fluoroadenosine-3'-phosphate
  modified_base 10: mod_base = OTHER; note = 2'-O-methyluridine-3'-phosphate
  modified_base 11: mod_base = OTHER; note = 2'-O-methyladenosine-3'-phosphate
  modified_base 12: mod_base = OTHER; note = 2'-O-methylguanosine-3'-phosphate
  modified_base 13: mod_base = OTHER; note = 2'-O-methylguanosine-3'-phosphate
  modified_base 14: mod_base = OTHER; note = 2'-O-methylcytidine-3'-phosphate
  modified_base 15: mod_base = OTHER; note = 2'-O-methylcytidine-3'-phosphate
  modified_base 16: mod_base = OTHER; note = 2'-O-methyluridine-3'-phosphate
  modified_base 17: mod_base = OTHER; note = 2'-O-methylguanosine-3'-phosphate
  modified_base 18: mod_base = OTHER; note = 2'-O-methylguanosine-3'-phosphate
  modified_base 19: mod_base = OTHER; note = 2'-O-methyladenosine
gcaccctcataggcctgga

SEQ ID NO: 2386 - RNA, 21 nt, synthetic construct
  source 1..21: mol_type = other RNA
  modified_base 1: mod_base = OTHER; note = 2'-O-methyluridine-3'-phosphate
  modified_base 2: mod_base = OTHER; note = 2'-fluorocytidine-3'-phosphate
  modified_base 3: mod_base = OTHER; note = 2'-O-methylcytidine-3'-phosphate
  modified_base 4: mod_base = OTHER; note = 2'-O-methyladenosine-3'-phosphate
  modified_base 5: mod_base = OTHER; note = 2'-O-methylguanosine-3'-phosphate
  modified_base 6: mod_base = OTHER; note = 2'-fluoroguanosine-3'-phosphate
  modified_base 7: mod_base = OTHER; note = 2'-O-methylcytidine-3'-phosphate
  modified_base 8: mod_base = OTHER; note = 2'-fluorocytidine-3'-phosphate
  modified_base 9: mod_base = OTHER; note = 2'-fluorouridine-3'-phosphate
  modified_base 10: mod_base = OTHER; note = 2'-O-methyladenosine-3'-phosphate
  modified_base 11: mod_base = OTHER; note = 2'-O-methyluridine-3'-phosphate
  modified_base 12: mod_base = OTHER; note = 2'-O-methylguanosine-3'-phosphate
  modified_base 13: mod_base = OTHER; note = 2'-O-methyladenosine-3'-phosphate
  modified_base 14: mod_base = OTHER; note = 2'-fluoroguanosine-3'-phosphate
  modified_base 15: mod_base = OTHER; note = 2'-O-methylguanosine-3'-phosphate
  modified_base 16: mod_base = OTHER; note = 2'-fluoroguanosine-3'-phosphate
  modified_base 17: mod_base = OTHER; note = 2'-O-methyluridine-3'-phosphate
  modified_base 18: mod_base = OTHER; note = 2'-O-methylguanosine-3'-phosphate
  modified_base 19: mod_base = OTHER; note = 2'-O-methylcytidine-3'-phosphate
  modified_base 20: mod_base = OTHER; note = 2'-O-methylcytidine-3'-phosphate
  modified_base 21: mod_base = OTHER; note = 2'-O-methylguanosine
tccaggcctatgagggtgccg

SEQ ID NO: 2387 - RNA, 21 nt, synthetic construct
  source 1..21: mol_type = other RNA
  modified_base 1: mod_base = OTHER; note = 2'-O-methylcytidine-3'-phosphate
  modified_base 2: mod_base = OTHER; note = 2'-O-methyladenosine-3'-phosphate
  modified_base 3: mod_base = OTHER; note = 2'-O-methylcytidine-3'-phosphate
  modified_base 4: mod_base = OTHER; note = 2'-O-methylcytidine-3'-phosphate
  modified_base 5: mod_base = OTHER; note = 2'-O-methylcytidine-3'-phosphate
  modified_base 6: mod_base = OTHER; note = 2'-O-methyluridine-3'-phosphate
  modified_base 7: mod_base = OTHER; note = 2'-fluorocytidine-3'-phosphate
  modified_base 8: mod_base = OTHER; note = 2'-O-methyladenosine-3'-phosphate
  modified_base 9: mod_base = OTHER; note = 2'-fluorouridine-3'-phosphate
  modified_base 10: mod_base = OTHER; note = 2'-fluoroadenosine-3'-phosphate
  modified_base 11: mod_base = OTHER; note = 2'-fluoroguanosine-3'-phosphate
  modified_base 12: mod_base = OTHER; note = 2'-O-methylguanosine-3'-phosphate
  modified_base 13: mod_base = OTHER; note = 2'-O-methylcytidine-3'-phosphate
  modified_base 14: mod_base = OTHER; note = 2'-O-methylcytidine-3'-phosphate
  modified_base 15: mod_base = OTHER; note = 2'-O-methyluridine-3'-phosphate
  modified_base 16: mod_base = OTHER; note = 2'-O-methylguanosine-3'-phosphate
  modified_base 17: mod_base = OTHER; note = 2'-O-methylguanosine-3'-phosphate
  modified_base 18: mod_base = OTHER; note = 2'-O-methyladenosine-3'-phosphate
  modified_base 19: mod_base = OTHER; note = 2'-O-methylguanosine-3'-phosphate
  modified_base 20: mod_base = OTHER; note = 2'-O-methyluridine-3'-phosphate
  modified_base 21: mod_base = OTHER; note = 2'-O-methyluridine
caccctcataggcctggagtt

SEQ ID NO: 2388 - RNA, 23 nt, synthetic construct
  source 1..23: mol_type = other RNA
  modified_base 1: mod_base = OTHER; note = 2'-O-methyladenosine-3'-phosphate
  modified_base 2: mod_base = OTHER; note = 2'-fluoroadenosine-3'-phosphate
  modified_base 3: mod_base = OTHER; note = 2'-O-methylcytidine-3'-phosphate
  modified_base 4: mod_base = OTHER; note = 2'-O-methyluridine-3'-phosphate
  modified_base 5: mod_base = OTHER; note = 2'-O-methylcytidine-3'-phosphate
  modified_base 6: mod_base = OTHER; note = 2'-fluorocytidine-3'-phosphate
  modified_base 7: mod_base = OTHER; note = 2'-O-methyladenosine-3'-phosphate
  modified_base 8: mod_base = OTHER; note = 2'-O-methylguanosine-3'-phosphate
  modified_base 9: mod_base = OTHER; note = 2'-O-methylguanosine-3'-phosphate
  modified_base 10: mod_base = OTHER; note = 2'-O-methylcytidine-3'-phosphate
  modified_base 11: mod_base = OTHER; note = 2'-O-methylcytidine-3'-phosphate
  modified_base 12: mod_base = OTHER; note = 2'-O-methyluridine-3'-phosphate
  modified_base 13: mod_base = OTHER; note = 2'-O-methyladenosine-3'-phosphate
  modified_base 14: mod_base = OTHER; note = 2'-fluorouridine-3'-phosphate
  modified_base 15: mod_base = OTHER; note = 2'-O-methylguanosine-3'-phosphate
  modified_base 16: mod_base = OTHER; note = 2'-fluoroadenosine-3'-phosphate
  modified_base 17: mod_base = OTHER; note = 2'-O-methylguanosine-3'-phosphate
  modified_base 18: mod_base = OTHER; note = 2'-O-methylguanosine-3'-phosphate
  modified_base 19: mod_base = OTHER; note = 2'-O-methylguanosine-3'-phosphate
  modified_base 20: mod_base = OTHER; note = 2'-O-methyluridine-3'-phosphate
  modified_base 21: mod_base = OTHER; note = 2'-O-methylguanosine-3'-phosphate
  modified_base 22: mod_base = OTHER; note = 2'-O-methylcytidine-3'-phosphate
  modified_base 23: mod_base = OTHER; note = 2'-O-methylcytidine
aactccaggcctatgagggtgcc

SEQ ID NO: 2389 - RNA, 21 nt, synthetic construct
  source 1..21: mol_type = other RNA
  modified_base 1: mod_base = OTHER; note = 2'-O-methylcytidine-3'-phosphate
  modified_base 2: mod_base = OTHER; note = 2'-O-methylguanosine-3'-phosphate
  modified_base 3: mod_base = OTHER; note = 2'-O-methylguanosine-3'-phosphate
  modified_base 4: mod_base = OTHER; note = 2'-O-methylcytidine-3'-phosphate
  modified_base 5: mod_base = OTHER; note = 2'-O-methyladenosine-3'-phosphate
  modified_base 6: mod_base = OTHER; note = 2'-O-methylcytidine-3'-phosphate
  modified_base 7: mod_base = OTHER; note = 2'-fluorocytidine-3'-phosphate
  modified_base 8: mod_base = OTHER; note = 2'-O-methylcytidine-3'-phosphate
  modified_base 9: mod_base = OTHER; note = 2'-fluorouridine-3'-phosphate
  modified_base 10: mod_base = OTHER; note = 2'-fluorocytidine-3'-phosphate
  modified_base 11: mod_base = OTHER; note = 2'-fluoroadenosine-3'-phosphate
  modified_base 12: mod_base = OTHER; note = 2'-O-methyluridine-3'-phosphate
  modified_base 13: mod_base = OTHER; note = 2'-O-methyladenosine-3'-phosphate
  modified_base 14: mod_base = OTHER; note = 2'-O-methylguanosine-3'-phosphate
  modified_base 15: mod_base = OTHER; note = 2'-O-methylguanosine-3'-phosphate
  modified_base 16: mod_base = OTHER; note = 2'-O-methylcytidine-3'-phosphate
  modified_base 17: mod_base = OTHER; note = 2'-O-methylcytidine-3'-phosphate
  modified_base 18: mod_base = OTHER; note = 2'-O-methyluridine-3'-phosphate
  modified_base 19: mod_base = OTHER; note = 2'-O-methylguanosine-3'-phosphate
  modified_base 20: mod_base = OTHER; note = 2'-O-methylguanosine-3'-phosphate
  modified_base 21: mod_base = OTHER; note = 2'-O-methyladenosine
cggcaccctcataggcctgga

SEQ ID NO: 2390 - RNA, 23 nt, synthetic construct
  source 1..23: mol_type = other RNA
  modified_base 1: mod_base = OTHER; note = 2'-O-methyluridine-3'-phosphate
  modified_base 2: mod_base = OTHER; note = 2'-fluorocytidine-3'-phosphate
  modified_base 3: mod_base = OTHER; note = 2'-O-methylcytidine-3'-phosphate
  modified_base 4: mod_base = OTHER; note = 2'-O-methyladenosine-3'-phosphate
  modified_base 5: mod_base = OTHER; note = 2'-O-methylguanosine-3'-phosphate
  modified_base 6: mod_base = OTHER; note = 2'-fluoroguanosine-3'-phosphate
  modified_base 7: mod_base = OTHER; note = 2'-O-methylcytidine-3'-phosphate
  modified_base 8: mod_base = OTHER; note = 2'-O-methylcytidine-3'-phosphate
  modified_base 9: mod_base = OTHER; note = 2'-O-methyluridine-3'-phosphate
  modified_base 10: mod_base = OTHER; note = 2'-O-methyladenosine-3'-phosphate
  modified_base 11: mod_base = OTHER; note = 2'-O-methyluridine-3'-phosphate
  modified_base 12: mod_base = OTHER; note = 2'-O-methylguanosine-3'-phosphate
  modified_base 13: mod_base = OTHER; note = 2'-O-methyladenosine-3'-phosphate
  modified_base 14: mod_base = OTHER; note = 2'-fluoroguanosine-3'-phosphate
  modified_base 15: mod_base = OTHER; note = 2'-O-methylguanosine-3'-phosphate
  modified_base 16: mod_base = OTHER; note = 2'-fluoroguanosine-3'-phosphate
  modified_base 17: mod_base = OTHER; note = 2'-O-methyluridine-3'-phosphate
  modified_base 18: mod_base = OTHER; note = 2'-O-methylguanosine-3'-phosphate
  modified_base 19: mod_base = OTHER; note = 2'-O-methylcytidine-3'-phosphate
  modified_base 20: mod_base = OTHER; note = 2'-O-methylcytidine-3'-phosphate
  modified_base 21: mod_base = OTHER; note = 2'-O-methylguanosine-3'-phosphate
  modified_base 22: mod_base = OTHER; note = 2'-O-methylcytidine-3'-phosphate
  modified_base 23: mod_base = OTHER; note = 2'-O-methyluridine
tccaggcctatgagggtgccgct

SEQ ID NO: 2391 - RNA, 19 nt, synthetic construct
  source 1..19: mol_type = other RNA
  modified_base 1: mod_base = OTHER; note = 2'-O-methyladenosine-3'-phosphate
  modified_base 2: mod_base = OTHER; note = 2'-O-methylcytidine-3'-phosphate
  modified_base 3: mod_base = OTHER; note = 2'-O-methylcytidine-3'-phosphate
  modified_base 4: mod_base = OTHER; note = 2'-O-methylcytidine-3'-phosphate
  modified_base 5: mod_base = OTHER; note = 2'-O-methyluridine-3'-phosphate
  modified_base 6: mod_base = OTHER; note = 2'-O-methylcytidine-3'-phosphate
  modified_base 7: mod_base = OTHER; note = 2'-fluoroadenosine-3'-phosphate
  modified_base 8: mod_base = OTHER; note = 2'-fluorouridine-3'-phosphate
  modified_base 9: mod_base = OTHER; note = 2'-fluoroadenosine-3'-phosphate
  modified_base 10: mod_base = OTHER; note = 2'-O-methylguanosine-3'-phosphate
  modified_base 11: mod_base = OTHER; note = 2'-O-methylguanosine-3'-phosphate
  modified_base 12: mod_base = OTHER; note = 2'-O-methylcytidine-3'-phosphate
  modified_base 13: mod_base = OTHER; note = 2'-O-methylcytidine-3'-phosphate
  modified_base 14: mod_base = OTHER; note = 2'-O-methyluridine-3'-phosphate
  modified_base 15: mod_base = OTHER; note = 2'-O-methylguanosine-3'-phosphate
  modified_base 16: mod_base = OTHER; note = 2'-O-methylguanosine-3'-phosphate
  modified_base 17: mod_base = OTHER; note = 2'-O-methyladenosine-3'-phosphate
  modified_base 18: mod_base = OTHER; note = 2'-O-methylguanosine-3'-phosphate
  modified_base 19: mod_base = OTHER; note = 2'-O-methyluridine
accctcataggcctggagt

SEQ ID NO: 2392 - RNA, 21 nt, synthetic construct
  source 1..21: mol_type = other RNA
  modified_base 1: mod_base = OTHER; note = 2'-O-methyladenosine-3'-phosphate
  modified_base 2: mod_base = OTHER; note = 2'-fluorocytidine-3'-phosphate
  modified_base 3: mod_base = OTHER; note = 2'-O-methyluridine-3'-phosphate
  modified_base 4: mod_base = OTHER; note = 2'-O-methylcytidine-3'-phosphate
  modified_base 5: mod_base = OTHER; note = 2'-O-methylcytidine-3'-phosphate
  modified_base 6: mod_base = OTHER; note = 2'-O-methyladenosine-3'-phosphate
  modified_base 7: mod_base = OTHER; note = 2'-O-methylguanosine-3'-phosphate
  modified_base 8: mod_base = OTHER; note = 2'-O-methylguanosine-3'-phosphate
  modified_base 9: mod_base = OTHER; note = 2'-O-methylcytidine-3'-phosphate
  modified_base 10: mod_base = OTHER; note = 2'-O-methylcytidine-3'-phosphate
  modified_base 11: mod_base = OTHER; note = 2'-O-methyluridine-3'-phosphate
  modified_base 12: mod_base = OTHER; note = 2'-O-methyladenosine-3'-phosphate
  modified_base 13: mod_base = OTHER; note = 2'-O-methyluridine-3'-phosphate
  modified_base 14: mod_base = OTHER; note = 2'-fluoroguanosine-3'-phosphate
  modified_base 15: mod_base = OTHER; note = 2'-O-methyladenosine-3'-phosphate
  modified_base 16: mod_base = OTHER; note = 2'-O-methylguanosine-3'-phosphate
  modified_base 17: mod_base = OTHER; note = 2'-O-methylguanosine-3'-phosphate
  modified_base 18: mod_base = OTHER; note = 2'-O-methylguanosine-3'-phosphate
  modified_base 19: mod_base = OTHER; note = 2'-O-methyluridine-3'-phosphate
  modified_base 20: mod_base = OTHER; note = 2'-O-methylguanosine-3'-phosphate
  modified_base 21: mod_base = OTHER; note = 2'-O-methylcytidine
actccaggcctatgagggtgc

SEQ ID NO: 2393 - RNA, 21 nt, synthetic construct
  source 1..21: mol_type = other RNA
  modified_base 1: mod_base = OTHER; note = 2'-O-methylguanosine-3'-phosphate
  modified_base 2: mod_base = OTHER; note = 2'-O-methylcytidine-3'-phosphate
  modified_base 3: mod_base = OTHER; note = 2'-O-methyladenosine-3'-phosphate
  modified_base 4: mod_base = OTHER; note = 2'-O-methylcytidine-3'-phosphate
  modified_base 5: mod_base = OTHER; note = 2'-O-methylcytidine-3'-phosphate
  modified_base 6: mod_base = OTHER; note = 2'-O-methylcytidine-3'-phosphate
  modified_base 7: mod_base = OTHER; note = 2'-O-methyluridine-3'-phosphate
  modified_base 8: mod_base = OTHER; note = 2'-O-methylcytidine-3'-phosphate
  modified_base 9: mod_base = OTHER; note = 2'-fluoroadenosine-3'-phosphate
  modified_base 10: mod_base = OTHER; note = 2'-fluorouridine-3'-phosphate
  modified_base 11: mod_base = OTHER; note = 2'-fluoroadenosine-3'-phosphate
  modified_base 12: mod_base = OTHER; note = 2'-O-methylguanosine-3'-phosphate
  modified_base 13: mod_base = OTHER; note = 2'-O-methylguanosine-3'-phosphate
  modified_base 14: mod_base = OTHER; note = 2'-O-methylcytidine-3'-phosphate
  modified_base 15: mod_base = OTHER; note = 2'-O-methylcytidine-3'-phosphate
  modified_base 16: mod_base = OTHER; note = 2'-O-methyluridine-3'-phosphate
  modified_base 17: mod_base = OTHER; note = 2'-O-methylguanosine-3'-phosphate
  modified_base 18: mod_base = OTHER; note = 2'-O-methylguanosine-3'-phosphate
  modified_base 19: mod_base = OTHER; note = 2'-O-methyladenosine-3'-phosphate
  modified_base 20: mod_base = OTHER; note = 2'-O-methylguanosine-3'-phosphate
  modified_base 21: mod_base = OTHER; note = 2'-O-methyluridine
gcaccctcataggcctggagt

SEQ ID NO: 2394 - RNA, 23 nt, synthetic construct
  source 1..23: mol_type = other RNA
  modified_base 1: mod_base = OTHER; note = 2'-O-methyladenosine-3'-phosphate
  modified_base 2: mod_base = OTHER; note = 2'-fluorocytidine-3'-phosphate
  modified_base 3: mod_base = OTHER; note = 2'-O-methyluridine-3'-phosphate
  modified_base 4: mod_base = OTHER; note = 2'-O-methylcytidine-3'-phosphate
  modified_base 5: mod_base = OTHER; note = 2'-O-methylcytidine-3'-phosphate
  modified_base 6: mod_base = OTHER; note = 2'-O-methyladenosine-3'-phosphate
  modified_base 7: mod_base = OTHER; note = 2'-O-methylguanosine-3'-phosphate
  modified_base 8: mod_base = OTHER; note = 2'-O-methylguanosine-3'-phosphate
  modified_base 9: mod_base = OTHER; note = 2'-O-methylcytidine-3'-phosphate
  modified_base 10: mod_base = OTHER; note = 2'-O-methylcytidine-3'-phosphate
  modified_base 11: mod_base = OTHER; note = 2'-O-methyluridine-3'-phosphate
  modified_base 12: mod_base = OTHER; note = 2'-O-methyladenosine-3'-phosphate
  modified_base 13: mod_base = OTHER; note = 2'-O-methyluridine-3'-phosphate
  modified_base 14: mod_base = OTHER; note = 2'-fluoroguanosine-3'-phosphate
  modified_base 15: mod_base = OTHER; note = 2'-O-methyladenosine-3'-phosphate
  modified_base 16: mod_base = OTHER; note = 2'-O-methylguanosine-3'-phosphate
  modified_base 17: mod_base = OTHER; note = 2'-O-methylguanosine-3'-phosphate
  modified_base 18: mod_base = OTHER; note = 2'-O-methylguanosine-3'-phosphate
  modified_base 19: mod_base = OTHER; note = 2'-O-methyluridine-3'-phosphate
  modified_base 20: mod_base = OTHER; note = 2'-O-methylguanosine-3'-phosphate
  modified_base 21: mod_base = OTHER; note = 2'-O-methylcytidine-3'-phosphate
  modified_base 22: mod_base = OTHER; note = 2'-O-methylcytidine-3'-phosphate
  modified_base 23: mod_base = OTHER; note = 2'-O-methylguanosine
actccaggcctatgagggtgccg

SEQ ID NO: 2395 - RNA, 19 nt, synthetic construct
  source 1..19: mol_type = other RNA
  modified_base 1: mod_base = OTHER; note = 2'-O-methyladenosine-3'-phosphate
  modified_base 2: mod_base = OTHER; note = 2'-O-methylcytidine-3'-phosphate
  modified_base 3: mod_base = OTHER; note = 2'-O-methylcytidine-3'-phosphate
  modified_base 4: mod_base = OTHER; note = 2'-O-methylcytidine-3'-phosphate
  modified_base 5: mod_base = OTHER; note = 2'-fluorouridine-3'-phosphate
  modified_base 6: mod_base = OTHER; note = 2'-O-methylcytidine-3'-phosphate
  modified_base 7: mod_base = OTHER; note = 2'-fluoroadenosine-3'-phosphate
  modified_base 8: mod_base = OTHER; note = 2'-fluorouridine-3'-phosphate
  modified_base 9: mod_base = OTHER; note = 2'-fluoroadenosine-3'-phosphate
  modified_base 10: mod_base = OTHER; note = 2'-O-methylguanosine-3'-phosphate
  modified_base 11: mod_base = OTHER; note = 2'-O-methylguanosine-3'-phosphate
  modified_base 12: mod_base = OTHER; note = 2'-O-methylcytidine-3'-phosphate
  modified_base 13: mod_base = OTHER; note = 2'-O-methylcytidine-3'-phosphate
  modified_base 14: mod_base = OTHER; note = 2'-O-methyluridine-3'-phosphate
  modified_base 15: mod_base = OTHER; note = 2'-O-methylguanosine-3'-phosphate
  modified_base 16: mod_base = OTHER; note = 2'-O-methylguanosine-3'-phosphate
  modified_base 17: mod_base = OTHER; note = 2'-O-methyladenosine-3'-phosphate
  modified_base 18: mod_base = OTHER; note = 2'-O-methylguanosine-3'-phosphate
  modified_base 19: mod_base = OTHER; note = 2'-O-methyluridine
accctcataggcctggagt

SEQ ID NO: 2396 - RNA, 21 nt, synthetic construct
  source 1..21: mol_type = other RNA
  modified_base 1: mod_base = OTHER; note = 2'-O-methyladenosine-3'-phosphate
  modified_base 2: mod_base = OTHER; note = 2'-fluorocytidine-3'-phosphate
  modified_base 3: mod_base = OTHER; note = 2'-O-methyluridine-3'-phosphate
  modified_base 4: mod_base = OTHER; note = 2'-O-methylcytidine-3'-phosphate
  modified_base 5: mod_base = OTHER; note = 2'-O-methylcytidine-3'-phosphate
  modified_base 6: mod_base = OTHER; note = 2'-fluoroadenosine-3'-phosphate
  modified_base 7: mod_base = OTHER; note = 2'-O-methylguanosine-3'-phosphate
  modified_base 8: mod_base = OTHER; note = 2'-fluoroguanosine-3'-phosphate
  modified_base 9: mod_base = OTHER; note = 2'-fluorocytidine-3'-phosphate
  modified_base 10: mod_base = OTHER; note = 2'-O-methylcytidine-3'-phosphate
  modified_base 11: mod_base = OTHER; note = 2'-O-methyluridine-3'-phosphate
  modified_base 12: mod_base = OTHER; note = 2'-O-methyladenosine-3'-phosphate
  modified_base 13: mod_base = OTHER; note = 2'-O-methyluridine-3'-phosphate
  modified_base 14: mod_base = OTHER; note = 2'-fluoroguanosine-3'-phosphate
  modified_base 15: mod_base = OTHER; note = 2'-O-methyladenosine-3'-phosphate
  modified_base 16: mod_base = OTHER; note = 2'-fluoroguanosine-3'-phosphate
  modified_base 17: mod_base = OTHER; note = 2'-O-methylguanosine-3'-phosphate
  modified_base 18: mod_base = OTHER; note = 2'-O-methylguanosine-3'-phosphate
  modified_base 19: mod_base = OTHER; note = 2'-O-methyluridine-3'-phosphate
  modified_base 20: mod_base = OTHER; note = 2'-O-methylguanosine-3'-phosphate
  modified_base 21: mod_base = OTHER; note = 2'-O-methylcytidine
actccaggcctatgagggtgc

SEQ ID NO: 2397 - RNA, 21 nt, synthetic construct
  source 1..21: mol_type = other RNA
  modified_base 1: mod_base = OTHER; note = 2'-O-methylguanosine-3'-phosphate
  modified_base 2: mod_base = OTHER; note = 2'-O-methylcytidine-3'-phosphate
  modified_base 3: mod_base = OTHER; note = 2'-O-methyladenosine-3'-phosphate
  modified_base 4: mod_base = OTHER; note = 2'-O-methylcytidine-3'-phosphate
  modified_base 5: mod_base = OTHER; note = 2'-O-methylcytidine-3'-phosphate
  modified_base 6: mod_base = OTHER; note = 2'-O-methylcytidine-3'-phosphate
  modified_base 7: mod_base = OTHER; note = 2'-fluorouridine-3'-phosphate
  modified_base 8: mod_base = OTHER; note = 2'-O-methylcytidine-3'-phosphate
  modified_base 9: mod_base = OTHER; note = 2'-fluoroadenosine-3'-phosphate
  modified_base 10: mod_base = OTHER; note = 2'-fluorouridine-3'-phosphate
  modified_base 11: mod_base = OTHER; note = 2'-fluoroadenosine-3'-phosphate
  modified_base 12: mod_base = OTHER; note = 2'-O-methylguanosine-3'-phosphate
  modified_base 13: mod_base = OTHER; note = 2'-O-methylguanosine-3'-phosphate
  modified_base 14: mod_base = OTHER; note = 2'-O-methylcytidine-3'-phosphate
  modified_base 15: mod_base = OTHER; note = 2'-O-methylcytidine-3'-phosphate
  modified_base 16: mod_base = OTHER; note = 2'-O-methyluridine-3'-phosphate
  modified_base 17: mod_base = OTHER; note = 2'-O-methylguanosine-3'-phosphate
  modified_base 18: mod_base = OTHER; note = 2'-O-methylguanosine-3'-phosphate
  modified_base 19: mod_base = OTHER; note = 2'-O-methyladenosine-3'-phosphate
  modified_base 20: mod_base = OTHER; note = 2'-O-methylguanosine-3'-phosphate
  modified_base 21: mod_base = OTHER; note = 2'-O-methyluridine
gcaccctcataggcctggagt

SEQ ID NO: 2398 - RNA, 23 nt, synthetic construct
  source 1..23: mol_type = other RNA
  modified_base 1: mod_base = OTHER; note = 2'-O-methyladenosine-3'-phosphate
  modified_base 2: mod_base = OTHER; note = 2'-fluorocytidine-3'-phosphate
  modified_base 3: mod_base = OTHER; note = 2'-O-methyluridine-3'-phosphate
  modified_base 4: mod_base = OTHER; note = 2'-O-methylcytidine-3'-phosphate
  modified_base 5: mod_base = OTHER; note = 2'-O-methylcytidine-3'-phosphate
  modified_base 6: mod_base = OTHER; note = 2'-fluoroadenosine-3'-phosphate
  modified_base 7: mod_base = OTHER; note = 2'-O-methylguanosine-3'-phosphate
  modified_base 8: mod_base = OTHER; note = 2'-O-methylguanosine-3'-phosphate
  modified_base 9: mod_base = OTHER; note = 2'-O-methylcytidine-3'-phosphate
  modified_base 10: mod_base = OTHER; note = 2'-O-methylcytidine-3'-phosphate
  modified_base 11: mod_base = OTHER; note = 2'-O-methyluridine-3'-phosphate
  modified_base 12: mod_base = OTHER; note = 2'-O-methyladenosine-3'-phosphate
  modified_base 13: mod_base = OTHER; note = 2'-O-methyluridine-3'-phosphate
  modified_base 14: mod_base = OTHER; note = 2'-fluoroguanosine-3'-phosphate
  modified_base 15: mod_base = OTHER; note = 2'-O-methyladenosine-3'-phosphate
  modified_base 16: mod_base = OTHER; note = 2'-fluoroguanosine-3'-phosphate
  modified_base 17: mod_base = OTHER; note = 2'-O-methylguanosine-3'-phosphate
  modified_base 18: mod_base = OTHER; note = 2'-O-methylguanosine-3'-phosphate
  modified_base 19: mod_base = OTHER; note = 2'-O-methyluridine-3'-phosphate
  modified_base 20: mod_base = OTHER; note = 2'-O-methylguanosine-3'-phosphate
  modified_base 21: mod_base = OTHER; note = 2'-O-methylcytidine-3'-phosphate
  modified_base 22: mod_base = OTHER; note = 2'-O-methylcytidine-3'-phosphate
  modified_base 23: mod_base = OTHER; note = 2'-O-methylguanosine
actccaggcctatgagggtgccg

SEQ ID NO: 2399 - RNA, 19 nt, synthetic construct
  source 1..19: mol_type = other RNA
  modified_base 1: mod_base = OTHER; note = 2'-O-methylguanosine-3'-phosphate
  modified_base 2: mod_base = OTHER; note = 2'-O-methylcytidine-3'-phosphate
  modified_base 3: mod_base = OTHER; note = 2'-O-methylcytidine-3'-phosphate
  modified_base 4: mod_base = OTHER; note = 2'-O-methyluridine-3'-phosphate
  modified_base 5: mod_base = OTHER; note = 2'-O-methylguanosine-3'-phosphate
  modified_base 6: mod_base = OTHER; note = 2'-O-methylguanosine-3'-phosphate
  modified_base 7: mod_base = OTHER; note = 2'-fluoroadenosine-3'-phosphate
  modified_base 8: mod_base = OTHER; note = 2'-fluoroguanosine-3'-phosphate
  modified_base 9: mod_base = OTHER; note = 2'-fluorouridine-3'-phosphate
  modified_base 10: mod_base = OTHER; note = 2'-O-methyluridine-3'-phosphate
  modified_base 11: mod_base = OTHER; note = 2'-O-methyluridine-3'-phosphate
  modified_base 12: mod_base = OTHER; note = 2'-O-methyladenosine-3'-phosphate
  modified_base 13: mod_base = OTHER; note = 2'-O-methyluridine-3'-phosphate
  modified_base 14: mod_base = OTHER; note = 2'-O-methyluridine-3'-phosphate
  modified_base 15: mod_base = OTHER; note = 2'-O-methylcytidine-3'-phosphate
  modified_base 16: mod_base = OTHER; note = 2'-O-methylguanosine-3'-phosphate
  modified_base 17: mod_base = OTHER; note = 2'-O-methylguanosine-3'-phosphate
  modified_base 18: mod_base = OTHER; note = 2'-O-methyladenosine-3'-phosphate
  modified_base 19: mod_base = OTHER; note = 2'-O-methyladenosine
gcctggagtttattcggaa

SEQ ID NO: 2400 - RNA, 21 nt, synthetic construct
  source 1..21: mol_type = other RNA
  modified_base 1: mod_base = OTHER; note = 2'-O-methyluridine-3'-phosphate
  modified_base 2: mod_base = OTHER; note = 2'-fluorouridine-3'-phosphate
  modified_base 3: mod_base = OTHER; note = 2'-O-methylcytidine-3'-phosphate
  modified_base 4: mod_base = OTHER; note = 2'-O-methylcytidine-3'-phosphate
  modified_base 5: mod_base = OTHER; note = 2'-O-methylguanosine-3'-phosphate
  modified_base 6: mod_base = OTHER; note = 2'-O-methyladenosine-3'-phosphate
  modified_base 7: mod_base = OTHER; note = 2'-O-methyladenosine-3'-phosphate
  modified_base 8: mod_base = OTHER; note = 2'-O-methyluridine-3'-phosphate
  modified_base 9: mod_base = OTHER; note = 2'-O-methyladenosine-3'-phosphate
  modified_base 10: mod_base = OTHER; note = 2'-O-methyladenosine-3'-phosphate
  modified_base 11: mod_base = OTHER; note = 2'-O-methyladenosine-3'-phosphate
  modified_base 12: mod_base = OTHER; note = 2'-O-methylcytidine-3'-phosphate
  modified_base 13: mod_base = OTHER; note = 2'-O-methyluridine-3'-phosphate
  modified_base 14: mod_base = OTHER; note = 2'-fluorocytidine-3'-phosphate
  modified_base 15: mod_base = OTHER; note = 2'-O-methylcytidine-3'-phosphate
  modified_base 16: mod_base = OTHER; note = 2'-O-methyladenosine-3'-phosphate
  modified_base 17: mod_base = OTHER; note = 2'-O-methylguanosine-3'-phosphate
  modified_base 18: mod_base = OTHER; note = 2'-O-methylguanosine-3'-phosphate
  modified_base 19: mod_base = OTHER; note = 2'-O-methylcytidine-3'-phosphate
  modified_base 20: mod_base = OTHER; note = 2'-O-methylcytidine-3'-phosphate
  modified_base 21: mod_base = OTHER; note = 2'-O-methyluridine
ttccgaataaactccaggcct

SEQ ID NO: 2401 - RNA, 21 nt, synthetic construct
  source 1..21: mol_type = other RNA
  modified_base 1: mod_base = OTHER; note = 2'-O-methyladenosine-3'-phosphate
  modified_base 2: mod_base = OTHER; note = 2'-O-methylguanosine-3'-phosphate
  modified_base 3: mod_base = OTHER; note = 2'-O-methylguanosine-3'-phosphate
  modified_base 4: mod_base = OTHER; note = 2'-O-methylcytidine-3'-phosphate
  modified_base 5: mod_base = OTHER; note = 2'-O-methylcytidine-3'-phosphate
  modified_base 6: mod_base = OTHER; note = 2'-O-methyluridine-3'-phosphate
  modified_base 7: mod_base = OTHER; note = 2'-O-methylguanosine-3'-phosphate
  modified_base 8: mod_base = OTHER; note = 2'-O-methylguanosine-3'-phosphate
  modified_base 9: mod_base = OTHER; note = 2'-fluoroadenosine-3'-phosphate
  modified_base 10: mod_base = OTHER; note = 2'-fluoroguanosine-3'-phosphate
  modified_base 11: mod_base = OTHER; note = 2'-fluorouridine-3'-phosphate
  modified_base 12: mod_base = OTHER; note = 2'-O-methyluridine-3'-phosphate
  modified_base 13: mod_base = OTHER; note = 2'-O-methyluridine-3'-phosphate
  modified_base 14: mod_base = OTHER; note = 2'-O-methyladenosine-3'-phosphate
  modified_base 15: mod_base = OTHER; note = 2'-O-methyluridine-3'-phosphate
  modified_base 16: mod_base = OTHER; note = 2'-O-methyluridine-3'-phosphate
  modified_base 17: mod_base = OTHER; note = 2'-O-methylcytidine-3'-phosphate
  modified_base 18: mod_base = OTHER; note = 2'-O-methylguanosine-3'-phosphate
  modified_base 19: mod_base = OTHER; note = 2'-O-methylguanosine-3'-phosphate
  modified_base 20: mod_base = OTHER; note = 2'-O-methyladenosine-3'-phosphate
  modified_base 21: mod_base = OTHER; note = 2'-O-methyladenosine
aggcctggagtttattcggaa

SEQ ID NO: 2402 - RNA, 23 nt, synthetic construct
  source 1..23: mol_type = other RNA
  modified_base 1: mod_base = OTHER; note = 2'-O-methyluridine-3'-phosphate
  modified_base 2: mod_base = OTHER; note = 2'-fluorouridine-3'-phosphate
  modified_base 3: mod_base = OTHER; note = 2'-O-methylcytidine-3'-phosphate
  modified_base 4: mod_base = OTHER; note = 2'-O-methylcytidine-3'-phosphate
  modified_base 5: mod_base = OTHER; note = 2'-O-methylguanosine-3'-phosphate
  modified_base 6: mod_base = OTHER; note = 2'-O-methyladenosine-3'-phosphate
  modified_base 7: mod_base = OTHER; note = 2'-O-methyladenosine-3'-phosphate
  modified_base 8: mod_base = OTHER; note = 2'-O-methyluridine-3'-phosphate
  modified_base 9: mod_base = OTHER; note = 2'-O-methyladenosine-3'-phosphate
  modified_base 10: mod_base = OTHER; note = 2'-O-methyladenosine-3'-phosphate
  modified_base 11: mod_base = OTHER; note = 2'-O-methyladenosine-3'-phosphate
  modified_base 12: mod_base = OTHER; note = 2'-O-methylcytidine-3'-phosphate
  modified_base 13: mod_base = OTHER; note = 2'-O-methyluridine-3'-phosphate
  modified_base 14: mod_base = OTHER; note = 2'-fluorocytidine-3'-phosphate
  modified_base 15: mod_base = OTHER; note = 2'-O-methylcytidine-3'-phosphate
  modified_base 16: mod_base = OTHER; note = 2'-O-methyladenosine-3'-phosphate
  modified_base 17: mod_base = OTHER; note = 2'-O-methylguanosine-3'-phosphate
  modified_base 18: mod_base = OTHER; note = 2'-O-methylguanosine-3'-phosphate
  modified_base 19: mod_base = OTHER; note = 2'-O-methylcytidine-3'-phosphate
  modified_base 20: mod_base = OTHER; note = 2'-O-methylcytidine-3'-phosphate
  modified_base 21: mod_base = OTHER; note = 2'-O-methyluridine-3'-phosphate
  modified_base 22: mod_base = OTHER; note = 2'-O-methyladenosine-3'-phosphate
  modified_base 23: mod_base = OTHER; note = 2'-O-methyluridine
ttccgaataaactccaggcctat

SEQ ID NO: 2403 - DNA, 21 bp, synthetic construct
  source 1..21: mol_type = other DNA
  modified_base 1: mod_base = OTHER; note = 2'-O-methylguanosine-3'-phosphate
  modified_base 2: mod_base = OTHER; note = 2'-O-methylcytidine-3'-phosphate
  modified_base 3: mod_base = OTHER; note = 2'-O-methylcytidine-3'-phosphate
  modified_base 4: mod_base = OTHER; note = 2'-O-methyluridine-3'-phosphate
  modified_base 5: mod_base = OTHER; note = 2'-O-methylguanosine-3'-phosphate
  modified_base 6: mod_base = OTHER; note = 2'-O-methylguanosine-3'-phosphate
  modified_base 7: mod_base = OTHER; note = 2'-fluoroadenosine-3'-phosphate
  modified_base 8: mod_base = OTHER; note = 2'-fluoroguanosine-3'-phosphate
  modified_base 9: mod_base = OTHER; note = 2'-fluorouridine-3'-phosphate
  modified_base 10: mod_base = OTHER; note = 2'-O-methyluridine-3'-phosphate
  modified_base 11: mod_base = OTHER; note = 2'-O-methyluridine-3'-phosphate
  modified_base 12: mod_base = OTHER; note = 2'-O-methyladenosine-3'-phosphate
  modified_base 13: mod_base = OTHER; note = 2'-O-methyluridine-3'-phosphate
  modified_base 14: mod_base = OTHER; note = 2'-O-methyluridine-3'-phosphate
  modified_base 15: mod_base = OTHER; note = 2'-O-methylcytidine-3'-phosphate
  modified_base 16: mod_base = OTHER; note = 2'-O-methylguanosine-3'-phosphate
  modified_base 17: mod_base = OTHER; note = 2'-O-methylguanosine-3'-phosphate
  modified_base 18: mod_base = OTHER; note = 2'-O-methyladenosine-3'-phosphate
  modified_base 19: mod_base = OTHER; note = 2'-O-methyladenosine-3'-phosphate
  misc_feature 1..19: note = RNA
  misc_feature 20..21: note = DNA
gcctggagtttattcggaatt

SEQ ID NO: 2404 - DNA, 21 bp, synthetic construct
  source 1..21: mol_type = other DNA
  modified_base 1: mod_base = OTHER; note = 2'-O-methyluridine-3'-phosphate
  modified_base 2: mod_base = OTHER; note = 2'-fluorouridine-3'-phosphate
  modified_base 3: mod_base = OTHER; note = 2'-O-methylcytidine-3'-phosphate
  modified_base 4: mod_base = OTHER; note = 2'-O-methylcytidine-3'-phosphate
  modified_base 5: mod_base = OTHER; note = 2'-O-methylguanosine-3'-phosphate
  modified_base 6: mod_base = OTHER; note = 2'-O-methyladenosine-3'-phosphate
  modified_base 7: mod_base = OTHER; note = 2'-O-methyladenosine-3'-phosphate
  modified_base 8: mod_base = OTHER; note = 2'-O-methyluridine-3'-phosphate
  modified_base 9: mod_base = OTHER; note = 2'-O-methyladenosine-3'-phosphate
  modified_base 10: mod_base = OTHER; note = 2'-O-methyladenosine-3'-phosphate
  modified_base 11: mod_base = OTHER; note = 2'-O-methyladenosine-3'-phosphate
  modified_base 12: mod_base = OTHER; note = 2'-O-methylcytidine-3'-phosphate
  modified_base 13: mod_base = OTHER; note = 2'-O-methyluridine-3'-phosphate
  modified_base 14: mod_base = OTHER; note = 2'-fluorocytidine-3'-phosphate
  modified_base 15: mod_base = OTHER; note = 2'-O-methylcytidine-3'-phosphate
  modified_base 16: mod_base = OTHER; note = 2'-O-methyladenosine-3'-phosphate
  modified_base 17: mod_base = OTHER; note = 2'-O-methylguanosine-3'-phosphate
  modified_base 18: mod_base = OTHER; note = 2'-O-methylguanosine-3'-phosphate
  modified_base 19: mod_base = OTHER; note = 2'-O-methylcytidine-3'-phosphate
  misc_feature 1..19: note = RNA
  misc_feature 20..21: note = DNA
ttccgaataaactccaggctt

SEQ ID NO: 2405 - RNA, 19 nt, synthetic construct
  source 1..19: mol_type = other RNA
  modified_base 1: mod_base = OTHER; note = 2'-O-methylcytidine-3'-phosphorothioate
  modified_base 2: mod_base = OTHER; note = 2'-O-methyladenosine-3'-phosphorothioate
  modified_base 3: mod_base = OTHER; note = 2'-O-methyladenosine-3'-phosphate
  modified_base 4: mod_base = OTHER; note = 2'-O-methylguanosine-3'-phosphate
  modified_base 5: mod_base = OTHER; note = 2'-O-methylcytidine-3'-phosphate
  modified_base 6: mod_base = OTHER; note = 2'-O-methyladenosine-3'-phosphate
  modified_base 7: mod_base = OTHER; note = 2'-fluoroadenosine-3'-phosphate
  modified_base 8: mod_base = OTHER; note = 2'-fluoroguanosine-3'-phosphate
  modified_base 9: mod_base = OTHER; note = 2'-fluorocytidine-3'-phosphate
  modified_base 10: mod_base = OTHER; note = 2'-O-methyladenosine-3'-phosphate
  modified_base 11: mod_base = OTHER; note = 2'-O-methylguanosine-3'-phosphate
  modified_base 12: mod_base = OTHER; note = 2'-O-methyladenosine-3'-phosphate
  modified_base 13: mod_base = OTHER; note = 2'-O-methylcytidine-3'-phosphate
  modified_base 14: mod_base = OTHER; note = 2'-O-methyladenosine-3'-phosphate
  modified_base 15: mod_base = OTHER; note = 2'-O-methyluridine-3'-phosphate
  modified_base 16: mod_base = OTHER; note = 2'-O-methyluridine-3'-phosphate
  modified_base 17: mod_base = OTHER; note = 2'-O-methyluridine-3'-phosphate
  modified_base 18: mod_base = OTHER; note = 2'-O-methyladenosine-3'-phosphate
  modified_base 19: mod_base = OTHER; note = 2'-O-methyluridine
caagcaagcagacatttat

SEQ ID NO: 2406 - RNA, 21 nt, synthetic construct
  source 1..21: mol_type = other RNA
  modified_base 1: mod_base = OTHER; note = 2'-O-methyladenosine-3'-phosphorothioate
  modified_base 2: mod_base = OTHER; note = 2'-fluorouridine-3'-phosphorothioate
  modified_base 3: mod_base = OTHER; note = 2'-O-methyladenosine-3'-phosphate
  modified_base 4: mod_base = OTHER; note = 2'-O-methyladenosine-3'-phosphate
  modified_base 5: mod_base = OTHER; note = 2'-O-methyladenosine-3'-phosphate
  modified_base 6: mod_base = OTHER; note = 2'-fluorouridine-3'-phosphate
  modified_base 7: mod_base = OTHER; note = 2'-O-methylguanosine-3'-phosphate
  modified_base 8: mod_base = OTHER; note = 2'-O-methyluridine-3'-phosphate
  modified_base 9: mod_base = OTHER; note = 2'-O-methylcytidine-3'-phosphate
  modified_base 10: mod_base = OTHER; note = 2'-O-methyluridine-3'-phosphate
  modified_base 11: mod_base = OTHER; note = 2'-O-methylguanosine-3'-phosphate
  modified_base 12: mod_base = OTHER; note = 2'-O-methylcytidine-3'-phosphate
  modified_base 13: mod_base = OTHER; note = 2'-O-methyluridine-3'-phosphate
  modified_base 14: mod_base = OTHER; note = 2'-fluorouridine-3'-phosphate
  modified_base 15: mod_base = OTHER; note = 2'-O-methylguanosine-3'-phosphate
  modified_base 16: mod_base = OTHER; note = 2'-fluorocytidine-3'-phosphate
  modified_base 17: mod_base = OTHER; note = 2'-O-methyluridine-3'-phosphate
  modified_base 18: mod_base = OTHER; note = 2'-O-methyluridine-3'-phosphate
  modified_base 19: mod_base = OTHER; note = 2'-O-methylguanosine-3'-phosphorothioate
  modified_base 20: mod_base = OTHER; note = 2'-O-methylguanosine-3'-phosphorothioate
  modified_base 21: mod_base = OTHER; note = 2'-O-methylguanosine
ataaatgtctgcttgcttggg

SEQ ID NO: 2407 - RNA, 19 nt, synthetic construct
  source 1..19: mol_type = other RNA
  modified_base 1: mod_base = OTHER; note = 2'-O-methyladenosine-3'-phosphorothioate
  modified_base 2: mod_base = OTHER; note = 2'-O-methylguanosine-3'-phosphorothioate
  modified_base 3: mod_base = OTHER; note = 2'-O-methylcytidine-3'-phosphate
  modified_base 4: mod_base = OTHER; note = 2'-O-methyladenosine-3'-phosphate
  modified_base 5: mod_base = OTHER; note = 2'-O-methyladenosine-3'-phosphate
  modified_base 6: mod_base = OTHER; note = 2'-O-methylguanosine-3'-phosphate
  modified_base 7: mod_base = OTHER; note = 2'-fluorocytidine-3'-phosphate
  modified_base 8: mod_base = OTHER; note = 2'-fluoroadenosine-3'-phosphate
  modified_base 9: mod_base = OTHER; note = 2'-fluoroguanosine-3'-phosphate
  modified_base 10: mod_base = OTHER; note = 2'-O-methyladenosine-3'-phosphate
  modified_base 11: mod_base = OTHER; note = 2'-O-methylcytidine-3'-phosphate
  modified_base 12: mod_base = OTHER; note = 2'-O-methyladenosine-3'-phosphate
  modified_base 13: mod_base = OTHER; note = 2'-O-methyluridine-3'-phosphate
  modified_base 14: mod_base = OTHER; note = 2'-O-methyluridine-3'-phosphate
  modified_base 15: mod_base = OTHER; note = 2'-O-methyluridine-3'-phosphate
  modified_base 16: mod_base = OTHER; note = 2'-O-methyladenosine-3'-phosphate
  modified_base 17: mod_base = OTHER; note = 2'-O-methyluridine-3'-phosphate
  modified_base 18: mod_base = OTHER; note = 2'-O-methylcytidine-3'-phosphate
  modified_base 19: mod_base = OTHER; note = 2'-O-methyluridine
agcaagcagacatttatct

SEQ ID NO: 2408 - RNA, 21 nt, synthetic construct
  source 1..21: mol_type = other RNA
  modified_base 1: mod_base = OTHER; note = 2'-O-methyladenosine-3'-phosphorothioate
  modified_base 2: mod_base = OTHER; note = 2'-fluoroguanosine-3'-phosphorothioate
  modified_base 3: mod_base = OTHER; note = 2'-O-methyladenosine-3'-phosphate
  modified_base 4: mod_base = OTHER; note = 2'-O-methyluridine-3'-phosphate
  modified_base 5: mod_base = OTHER; note = 2'-O-methyladenosine-3'-phosphate
  modified_base 6: mod_base = OTHER; note = 2'-fluoroadenosine-3'-phosphate
  modified_base 7: mod_base = OTHER; note = 2'-O-methyladenosine-3'-phosphate
  modified_base 8: mod_base = OTHER; note = 2'-O-methyluridine-3'-phosphate
  modified_base 9: mod_base = OTHER; note = 2'-O-methylguanosine-3'-phosphate
  modified_base 10: mod_base = OTHER; note = 2'-O-methyluridine-3'-phosphate
  modified_base 11: mod_base = OTHER; note = 2'-O-methylcytidine-3'-phosphate
  modified_base 12: mod_base = OTHER; note = 2'-O-methyluridine-3'-phosphate
  modified_base 13: mod_base = OTHER; note = 2'-O-methylguanosine-3'-phosphate
  modified_base 14: mod_base = OTHER; note = 2'-fluorocytidine-3'-phosphate
  modified_base 15: mod_base = OTHER; note = 2'-O-methyluridine-3'-phosphate
  modified_base 16: mod_base = OTHER; note = 2'-fluorouridine-3'-phosphate
  modified_base 17: mod_base = OTHER; note = 2'-O-methylguanosine-3'-phosphate
  modified_base 18: mod_base = OTHER; note = 2'-O-methylcytidine-3'-phosphate
  modified_base 19: mod_base = OTHER; note = 2'-O-methyluridine-3'-phosphorothioate
  modified_base 20: mod_base = OTHER; note = 2'-O-methyluridine-3'-phosphorothioate
  modified_base 21: mod_base = OTHER; note = 2'-O-methylguanosine
agataaatgtctgcttgcttg

SEQ ID NO: 2409 - RNA, 19 nt, synthetic construct
  source 1..19: mol_type = other RNA
  modified_base 1: mod_base = OTHER; note = 2'-O-methyladenosine-3'-phosphorothioate
  modified_base 2: mod_base = OTHER; note = 2'-O-methyladenosine-3'-phosphorothioate
  modified_base 3: mod_base = OTHER; note = 2'-O-methylguanosine-3'-phosphate
  modified_base 4: mod_base = OTHER; note = 2'-O-methylcytidine-3'-phosphate
  modified_base 5: mod_base = OTHER; note = 2'-O-methyladenosine-3'-phosphate
  modified_base 6: mod_base = OTHER; note = 2'-O-methylguanosine-3'-phosphate
  modified_base 7: mod_base = OTHER; note = 2'-fluoroadenosine-3'-phosphate
  modified_base 8: mod_base = OTHER; note = 2'-fluorocytidine-3'-phosphate
  modified_base 9: mod_base = OTHER; note = 2'-fluoroadenosine-3'-phosphate
  modified_base 10: mod_base = OTHER; note = 2'-O-methyluridine-3'-phosphate
  modified_base 11: mod_base = OTHER; note = 2'-O-methyluridine-3'-phosphate
  modified_base 12: mod_base = OTHER; note = 2'-O-methyluridine-3'-phosphate
  modified_base 13: mod_base = OTHER; note = 2'-O-methyladenosine-3'-phosphate
  modified_base 14: mod_base = OTHER; note = 2'-O-methyluridine-3'-phosphate
  modified_base 15: mod_base = OTHER; note = 2'-O-methylcytidine-3'-phosphate
  modified_base 16: mod_base = OTHER; note = 2'-O-methyluridine-3'-phosphate
  modified_base 17: mod_base = OTHER; note = 2'-O-methyluridine-3'-phosphate
  modified_base 18: mod_base = OTHER; note = 2'-O-methyluridine-3'-phosphate
  modified_base 19: mod_base = OTHER; note = 2'-O-methyluridine
aagcagacatttatctttt

SEQ ID NO: 2410 - RNA, 21 nt, synthetic construct
  source 1..21: mol_type = other RNA
  modified_base 1: mod_base = OTHER; note = 2'-O-methyladenosine-3'-phosphorothioate
  modified_base 2: mod_base = OTHER; note = 2'-fluoroadenosine-3'-phosphorothioate
  modified_base 3: mod_base = OTHER; note = 2'-O-methyladenosine-3'-phosphate
  modified_base 4: mod_base = OTHER; note = 2'-O-methyladenosine-3'-phosphate
  modified_base 5: mod_base = OTHER; note = 2'-O-methylguanosine-3'-phosphate
  modified_base 6: mod_base = OTHER; note = 2'-fluoroadenosine-3'-phosphate
  modified_base 7: mod_base = OTHER; note = 2'-O-methyluridine-3'-phosphate
  modified_base 8: mod_base = OTHER; note = 2'-O-methyladenosine-3'-phosphate
  modified_base 9: mod_base = OTHER; note = 2'-O-methyladenosine-3'-phosphate
  modified_base 10: mod_base = OTHER; note = 2'-O-methyladenosine-3'-phosphate
  modified_base 11: mod_base = OTHER; note = 2'-O-methyluridine-3'-phosphate
  modified_base 12: mod_base = OTHER; note = 2'-O-methylguanosine-3'-phosphate
  modified_base 13: mod_base = OTHER; note = 2'-O-methyluridine-3'-phosphate
  modified_base 14: mod_base = OTHER; note = 2'-fluorocytidine-3'-phosphate
  modified_base 15: mod_base = OTHER; note = 2'-O-methyluridine-3'-phosphate
  modified_base 16: mod_base = OTHER; note = 2'-fluoroguanosine-3'-phosphate
  modified_base 17: mod_base = OTHER; note = 2'-O-methylcytidine-3'-phosphate
  modified_base 18: mod_base = OTHER; note = 2'-O-methyluridine-3'-phosphate
  modified_base 19: mod_base = OTHER; note = 2'-O-methyluridine-3'-phosphorothioate
  modified_base 20: mod_base = OTHER; note = 2'-O-methylguanosine-3'-phosphorothioate
  modified_base 21: mod_base = OTHER; note = 2'-O-methylcytidine
aaaagataaatgtctgcttgc

SEQ ID NO: 2411 - RNA, 19 nt, synthetic construct
  source 1..19: mol_type = other RNA
  modified_base 1: mod_base = OTHER; note = 2'-O-methylcytidine-3'-phosphorothioate
  modified_base 2: mod_base = OTHER; note = 2'-O-methyluridine-3'-phosphorothioate
  modified_base 3: mod_base = OTHER; note = 2'-O-methyladenosine-3'-phosphate
  modified_base 4: mod_base = OTHER; note = 2'-O-methylguanosine-3'-phosphate
  modified_base 5: mod_base = OTHER; note = 2'-O-methyladenosine-3'-phosphate
  modified_base 6: mod_base = OTHER; note = 2'-O-methylcytidine-3'-phosphate
  modified_base 7: mod_base = OTHER; note = 2'-fluorocytidine-3'-phosphate
  modified_base 8: mod_base = OTHER; note = 2'-fluorouridine-3'-phosphate
  modified_base 9: mod_base = OTHER; note = 2'-fluoroguanosine-3'-phosphate
  modified_base 10: mod_base = OTHER; note = 2'-O-methyluridine-3'-phosphate
  modified_base 11: mod_base = OTHER; note = 2'-O-methyluridine-3'-phosphate
  modified_base 12: mod_base = OTHER; note = 2'-O-methyluridine-3'-phosphate
  modified_base 13: mod_base = OTHER; note = 2'-O-methyluridine-3'-phosphate
  modified_base 14: mod_base = OTHER; note = 2'-O-methylguanosine-3'-phosphate
  modified_base 15: mod_base = OTHER; note = 2'-O-methylcytidine-3'-phosphate
  modified_base 16: mod_base = OTHER; note = 2'-O-methyluridine-3'-phosphate
  modified_base 17: mod_base = OTHER; note = 2'-O-methyluridine-3'-phosphate
  modified_base 18: mod_base = OTHER; note = 2'-O-methyluridine-3'-phosphate
  modified_base 19: mod_base = OTHER; note = 2'-O-methyluridine
ctagacctgttttgctttt

SEQ ID NO: 2412 - RNA, 21 nt, synthetic construct
  source 1..21: mol_type = other RNA
  modified_base 1: mod_base = OTHER; note = 2'-O-methyladenosine-3'-phosphorothioate
  modified_base 2: mod_base = OTHER; note = 2'-fluoroadenosine-3'-phosphorothioate
  modified_base 3: mod_base = OTHER; note = 2'-O-methyladenosine-3'-phosphate
  modified_base 4: mod_base = OTHER; note = 2'-O-methyladenosine-3'-phosphate
  modified_base 5: mod_base = OTHER; note = 2'-O-methylguanosine-3'-phosphate
  modified_base 6: mod_base = OTHER; note = 2'-fluorocytidine-3'-phosphate
  modified_base 7: mod_base = OTHER; note = 2'-O-methyladenosine-3'-phosphate
  modified_base 8: mod_base = OTHER; note = 2'-O-methyladenosine-3'-phosphate
  modified_base 9: mod_base = OTHER; note = 2'-O-methyladenosine-3'-phosphate
  modified_base 10: mod_base = OTHER; note = 2'-O-methyladenosine-3'-phosphate
  modified_base 11: mod_base = OTHER; note = 2'-O-methylcytidine-3'-phosphate
  modified_base 12: mod_base = OTHER; note = 2'-O-methyladenosine-3'-phosphate
  modified_base 13: mod_base = OTHER; note = 2'-O-methylguanosine-3'-phosphate
  modified_base 14: mod_base = OTHER; note = 2'-fluoroguanosine-3'-phosphate
  modified_base 15: mod_base = OTHER; note = 2'-O-methyluridine-3'-phosphate
  modified_base 16: mod_base = OTHER; note = 2'-fluorocytidine-3'-phosphate
  modified_base 17: mod_base = OTHER; note = 2'-O-methyluridine-3'-phosphate
  modified_base 18: mod_base = OTHER; note = 2'-O-methyladenosine-3'-phosphate
  modified_base 19: mod_base = OTHER; note = 2'-O-methylguanosine-3'-phosphorothioate
  modified_base 20: mod_base = OTHER; note = 2'-O-methyladenosine-3'-phosphorothioate
  modified_base 21: mod_base = OTHER; note = 2'-O-methyladenosine
aaaagcaaaacaggtctagaa

SEQ ID NO: 2413 - RNA, 19 nt, synthetic construct
  source 1..19: mol_type = other RNA
  modified_base 1: mod_base = OTHER; note = 2'-O-methyluridine-3'-phosphorothioate
  modified_base 2: mod_base = OTHER; note = 2'-O-methyluridine-3'-phosphorothioate
  modified_base 3: mod_base = OTHER; note = 2'-O-methyluridine-3'-phosphate
  modified_base 4: mod_base = OTHER; note = 2'-O-methyluridine-3'-phosphate
  modified_base 5: mod_base = OTHER; note = 2'-O-methylguanosine-3'-phosphate
  modified_base 6: mod_base = OTHER; note = 2'-O-methyluridine-3'-phosphate
  modified_base 7: mod_base = OTHER; note = 2'-fluoroadenosine-3'-phosphate
  modified_base 8: mod_base = OTHER; note = 2'-fluoroadenosine-3'-phosphate
  modified_base 9: mod_base = OTHER; note = 2'-fluorocytidine-3'-phosphate
  modified_base 10: mod_base = OTHER; note = 2'-O-methyluridine-3'-phosphate
  modified_base 11: mod_base = OTHER; note = 2'-O-methyluridine-3'-phosphate
  modified_base 12: mod_base = OTHER; note = 2'-O-methylguanosine-3'-phosphate
  modified_base 13: mod_base = OTHER; note = 2'-O-methyladenosine-3'-phosphate
  modified_base 14: mod_base = OTHER; note = 2'-O-methyladenosine-3'-phosphate
  modified_base 15: mod_base = OTHER; note = 2'-O-methylguanosine-3'-phosphate
  modified_base 16: mod_base = OTHER; note = 2'-O-methyladenosine-3'-phosphate
  modified_base 17: mod_base = OTHER; note = 2'-O-methyluridine-3'-phosphate
  modified_base 18: mod_base = OTHER; note = 2'-O-methyladenosine-3'-phosphate
  modified_base 19: mod_base = OTHER; note = 2'-O-methyluridine
ttttgtaacttgaagatat

SEQ ID NO: 2414 - RNA, 21 nt, synthetic construct
  source 1..21: mol_type = other RNA
  modified_base 1: mod_base = OTHER; note = 2'-O-methyladenosine-3'-phosphorothioate
  modified_base 2: mod_base = OTHER; note = 2'-fluorouridine-3'-phosphorothioate
  modified_base 3: mod_base = OTHER; note = 2'-O-methyladenosine-3'-phosphate
  modified_base 4: mod_base = OTHER; note = 2'-O-methyluridine-3'-phosphate
  modified_base 5: mod_base = OTHER; note = 2'-O-methylcytidine-3'-phosphate
  modified_base 6: mod_base = OTHER; note = 2'-fluorouridine-3'-phosphate
  modified_base 7: mod_base = OTHER; note = 2'-O-methyluridine-3'-phosphate
  modified_base 8: mod_base = OTHER; note = 2'-O-methylcytidine-3'-phosphate
  modified_base 9: mod_base = OTHER; note = 2'-O-methyladenosine-3'-phosphate
  modified_base 10: mod_base = OTHER; note = 2'-O-methyladenosine-3'-phosphate
  modified_base 11: mod_base = OTHER; note = 2'-O-methylguanosine-3'-phosphate
  modified_base 12: mod_base = OTHER; note = 2'-O-methyluridine-3'-phosphate
  modified_base 13: mod_base = OTHER; note = 2'-O-methyluridine-3'-phosphate
  modified_base 14: mod_base = OTHER; note = 2'-fluoroadenosine-3'-phosphate
  modified_base 15: mod_base = OTHER; note = 2'-O-methylcytidine-3'-phosphate
  modified_base 16: mod_base = OTHER; note = 2'-fluoroadenosine-3'-phosphate
  modified_base 17: mod_base = OTHER; note = 2'-O-methyladenosine-3'-phosphate
  modified_base 18: mod_base = OTHER; note = 2'-O-methyladenosine-3'-phosphate
  modified_base 19: mod_base = OTHER; note = 2'-O-methyladenosine-3'-phosphorothioate
  modified_base 20: mod_base = OTHER; note = 2'-O-methylguanosine-3'-phosphorothioate
  modified_base 21: mod_base = OTHER; note = 2'-O-methylcytidine
atatcttcaagttacaaaagc

SEQ ID NO: 2415 - RNA, 19 nt, synthetic construct
  source 1..19: mol_type = other RNA
  modified_base 1: mod_base = OTHER; note = 2'-O-methyluridine-3'-phosphorothioate
  modified_base 2: mod_base = OTHER; note = 2'-O-methyluridine-3'-phosphorothioate
  modified_base 3: mod_base = OTHER; note = 2'-O-methyluridine-3'-phosphate
  modified_base 4: mod_base = OTHER; note = 2'-O-methylguanosine-3'-phosphate
  modified_base 5: mod_base = OTHER; note = 2'-O-methyluridine-3'-phosphate
  modified_base 6: mod_base = OTHER; note = 2'-O-methyladenosine-3'-phosphate
  modified_base 7: mod_base = OTHER; note = 2'-fluoroadenosine-3'-phosphate
  modified_base 8: mod_base = OTHER; note = 2'-fluorocytidine-3'-phosphate
  modified_base 9: mod_base = OTHER; note = 2'-fluorouridine-3'-phosphate
  modified_base 10: mod_base = OTHER; note = 2'-O-methyluridine-3'-phosphate
  modified_base 11: mod_base = OTHER; note = 2'-O-methylguanosine-3'-phosphate
  modified_base 12: mod_base = OTHER; note = 2'-O-methyladenosine-3'-phosphate
  modified_base 13: mod_base = OTHER; note = 2'-O-methyladenosine-3'-phosphate
  modified_base 14: mod_base = OTHER; note = 2'-O-methylguanosine-3'-phosphate
  modified_base 15: mod_base = OTHER; note = 2'-O-methyladenosine-3'-phosphate
  modified_base 16: mod_base = OTHER; note = 2'-O-methyluridine-3'-phosphate
  modified_base 17: mod_base = OTHER; note = 2'-O-methyladenosine-3'-phosphate
  modified_base 18: mod_base = OTHER; note = 2'-O-methyluridine-3'-phosphate
  modified_base 19: mod_base = OTHER; note = 2'-O-methyluridine
tttgtaacttgaagatatt

SEQ ID NO: 2416 - RNA, 21 nt, synthetic construct
  source 1..21: mol_type = other RNA
  modified_base 1: mod_base = OTHER; note = 2'-O-methyladenosine-3'-phosphorothioate
  modified_base 2: mod_base = OTHER; note = 2'-fluoroadenosine-3'-phosphorothioate
  modified_base 3: mod_base = OTHER; note = 2'-O-methyluridine-3'-phosphate
  modified_base 4: mod_base = OTHER; note = 2'-O-methyladenosine-3'-phosphate
  modified_base 5: mod_base = OTHER; note = 2'-O-methyluridine-3'-phosphate
  modified_base 6: mod_base = OTHER; note = 2'-fluorocytidine-3'-phosphate
  modified_base 7: mod_base = OTHER; note = 2'-O-methyluridine-3'-phosphate
  modified_base 8: mod_base = OTHER; note = 2'-O-methyluridine-3'-phosphate
  modified_base 9: mod_base = OTHER; note = 2'-O-methylcytidine-3'-phosphate
  modified_base 10: mod_base = OTHER; note = 2'-O-methyladenosine-3'-phosphate
  modified_base 11: mod_base = OTHER; note = 2'-O-methyladenosine-3'-phosphate
  modified_base 12: mod_base = OTHER; note = 2'-O-methylguanosine-3'-phosphate
  modified_base 13: mod_base = OTHER; note = 2'-O-methyluridine-3'-phosphate
  modified_base 14: mod_base = OTHER; note = 2'-fluorouridine-3'-phosphate
  modified_base 15: mod_base = OTHER; note = 2'-O-methyladenosine-3'-phosphate
  modified_base 16: mod_base = OTHER; note = 2'-fluorocytidine-3'-phosphate
  modified_base 17: mod_base = OTHER; note = 2'-O-methyladenosine-3'-phosphate
  modified_base 18: mod_base = OTHER; note = 2'-O-methyladenosine-3'-phosphate
  modified_base 19: mod_base = OTHER; note = 2'-O-methyladenosine-3'-phosphorothioate
  modified_base 20: mod_base = OTHER; note = 2'-O-methyladenosine-3'-phosphorothioate
  modified_base 21: mod_base = OTHER; note = 2'-O-methylguanosine
aatatcttcaagttacaaaag

SEQ ID NO: 2417 - RNA, 19 nt, synthetic construct
  source 1..19: mol_type = other RNA
  modified_base 1: mod_base = OTHER; note = 2'-O-methyluridine-3'-phosphorothioate
  modified_base 2: mod_base = OTHER; note = 2'-O-methyluridine-3'-phosphorothioate
  modified_base 3: mod_base = OTHER; note = 2'-O-methylguanosine-3'-phosphate
  modified_base 4: mod_base = OTHER; note = 2'-O-methyluridine-3'-phosphate
  modified_base 5: mod_base = OTHER; note = 2'-O-methyladenosine-3'-phosphate
  modified_base 6: mod_base = OTHER; note = 2'-O-methyladenosine-3'-phosphate
  modified_base 7: mod_base = OTHER; note = 2'-fluorocytidine-3'-phosphate
  modified_base 8: mod_base = OTHER; note = 2'-fluorouridine-3'-phosphate
  modified_base 9: mod_base = OTHER; note = 2'-fluorouridine-3'-phosphate
  modified_base 10: mod_base = OTHER; note = 2'-O-methylguanosine-3'-phosphate
  modified_base 11: mod_base = OTHER; note = 2'-O-methyladenosine-3'-phosphate
  modified_base 12: mod_base = OTHER; note = 2'-O-methyladenosine-3'-phosphate
  modified_base 13: mod_base = OTHER; note = 2'-O-methylguanosine-3'-phosphate
  modified_base 14: mod_base = OTHER; note = 2'-O-methyladenosine-3'-phosphate
  modified_base 15: mod_base = OTHER; note = 2'-O-methyluridine-3'-phosphate
  modified_base 16: mod_base = OTHER; note = 2'-O-methyladenosine-3'-phosphate
  modified_base 17: mod_base = OTHER; note = 2'-O-methyluridine-3'-phosphate
  modified_base 18: mod_base = OTHER; note = 2'-O-methyluridine-3'-phosphate
  modified_base 19: mod_base = OTHER; note = 2'-O-methyluridine
ttgtaacttgaagatattt

SEQ ID NO: 2418 - RNA, 21 nt, synthetic construct
  source 1..21: mol_type = other RNA
  modified_base 1: mod_base = OTHER; note = 2'-O-methyladenosine-3'-phosphorothioate
  modified_base 2: mod_base = OTHER; note = 2'-fluoroadenosine-3'-phosphorothioate
  modified_base 3: mod_base = OTHER; note = 2'-O-methyladenosine-3'-phosphate
  modified_base 4: mod_base = OTHER; note = 2'-O-methyluridine-3'-phosphate
  modified_base 5: mod_base = OTHER; note = 2'-O-methyladenosine-3'-phosphate
  modified_base 6: mod_base = OTHER; note = 2'-fluorouridine-3'-phosphate
  modified_base 7: mod_base = OTHER; note = 2'-O-methylcytidine-3'-phosphate
  modified_base 8: mod_base = OTHER; note = 2'-O-methyluridine-3'-phosphate
  modified_base 9: mod_base = OTHER; note = 2'-O-methyluridine-3'-phosphate
  modified_base 10: mod_base = OTHER; note = 2'-O-methylcytidine-3'-phosphate
  modified_base 11: mod_base = OTHER; note = 2'-O-methyladenosine-3'-phosphate
  modified_base 12: mod_base = OTHER; note = 2'-O-methyladenosine-3'-phosphate
  modified_base 13: mod_base = OTHER; note = 2'-O-methylguanosine-3'-phosphate
  modified_base 14: mod_base = OTHER; note = 2'-fluorouridine-3'-phosphate
  modified_base 15: mod_base = OTHER; note = 2'-O-methyluridine-3'-phosphate
  modified_base 16: mod_base = OTHER; note = 2'-fluoroadenosine-3'-phosphate
  modified_base 17: mod_base = OTHER; note = 2'-O-methylcytidine-3'-phosphate
  modified_base 18: mod_base = OTHER; note = 2'-O-methyladenosine-3'-phosphate
  modified_base 19: mod_base = OTHER; note = 2'-O-methyladenosine-3'-phosphorothioate
  modified_base 20: mod_base = OTHER; note = 2'-O-methyladenosine-3'-phosphorothioate
  modified_base 21: mod_base = OTHER; note = 2'-O-methyladenosine
aaatatcttcaagttacaaaa

SEQ ID NO: 2419 - RNA, 19 nt, synthetic construct
  source 1..19: mol_type = other RNA
  modified_base 1: mod_base = OTHER; note = 2'-O-methyluridine-3'-phosphorothioate
  modified_base 2: mod_base = OTHER; note = 2'-O-methyladenosine-3'-phosphorothioate
  modified_base 3: mod_base = OTHER; note = 2'-O-methyladenosine-3'-phosphate
  modified_base 4: mod_base = OTHER; note = 2'-O-methylcytidine-3'-phosphate
  modified_base 5: mod_base = OTHER; note = 2'-O-methyluridine-3'-phosphate
  modified_base 6: mod_base = OTHER; note = 2'-O-methyluridine-3'-phosphate
  modified_base 7: mod_base = OTHER; note = 2'-fluoroguanosine-3'-phosphate
  modified_base 8: mod_base = OTHER; note = 2'-fluoroadenosine-3'-phosphate
  modified_base 9: mod_base = OTHER; note = 2'-fluoroadenosine-3'-phosphate
  modified_base 10: mod_base = OTHER; note = 2'-O-methylguanosine-3'-phosphate
  modified_base 11: mod_base = OTHER; note = 2'-O-methyladenosine-3'-phosphate
  modified_base 12: mod_base = OTHER; note = 2'-O-methyluridine-3'-phosphate
  modified_base 13: mod_base = OTHER; note = 2'-O-methyladenosine-3'-phosphate
  modified_base 14: mod_base = OTHER; note = 2'-O-methyluridine-3'-phosphate
  modified_base 15: mod_base = OTHER; note = 2'-O-methyluridine-3'-phosphate
  modified_base 16: mod_base = OTHER; note = 2'-O-methyluridine-3'-phosphate
  modified_base 17: mod_base = OTHER; note = 2'-O-methyladenosine-3'-phosphate
  modified_base 18: mod_base = OTHER; note = 2'-O-methyluridine-3'-phosphate
  modified_base 19: mod_base = OTHER; note = 2'-O-methyluridine
taacttgaagatatttatt

SEQ ID NO: 2420 - RNA, 21 nt, synthetic construct
  source 1..21: mol_type = other RNA
  modified_base 1: mod_base = OTHER; note = 2'-O-methyladenosine-3'-phosphorothioate
  modified_base 2: mod_base = OTHER; note = 2'-fluoroadenosine-3'-phosphorothioate
  modified_base 3: mod_base = OTHER; note = 2'-O-methyluridine-3'-phosphate
  modified_base 4: mod_base = OTHER; note = 2'-O-methyladenosine-3'-phosphate
  modified_base 5: mod_base = OTHER; note = 2'-O-methyladenosine-3'-phosphate
  modified_base 6: mod_base = OTHER; note = 2'-fluoroadenosine-3'-phosphate
  modified_base 7: mod_base = OTHER; note = 2'-O-methyluridine-3'-phosphate
  modified_base 8: mod_base = OTHER; note = 2'-O-methyladenosine-3'-phosphate
  modified_base 9: mod_base = OTHER; note = 2'-O-methyluridine-3'-phosphate
  modified_base 10: mod_base = OTHER; note = 2'-O-methylcytidine-3'-phosphate
  modified_base 11: mod_base = OTHER; note = 2'-O-methyluridine-3'-phosphate
  modified_base 12: mod_base = OTHER; note = 2'-O-methyluridine-3'-phosphate
  modified_base 13: mod_base = OTHER; note = 2'-O-methylcytidine-3'-phosphate
  modified_base 14: mod_base = OTHER; note = 2'-fluoroadenosine-3'-phosphate
  modified_base 15: mod_base = OTHER; note = 2'-O-methyladenosine-3'-phosphate
  modified_base 16: mod_base = OTHER; note = 2'-fluoroguanosine-3'-phosphate
  modified_base 17: mod_base = OTHER; note = 2'-O-methyluridine-3'-phosphate
  modified_base 18: mod_base = OTHER; note = 2'-O-methyluridine-3'-phosphate
  modified_base 19: mod_base = OTHER; note = 2'-O-methyladenosine-3'-phosphorothioate
  modified_base 20: mod_base = OTHER; note = 2'-O-methylcytidine-3'-phosphorothioate
  modified_base 21: mod_base = OTHER; note = 2'-O-methyladenosine
aataaatatcttcaagttaca

SEQ ID NO: 2421 - RNA, 19 nt, synthetic construct
  source 1..19: mol_type = other RNA
  modified_base 1: mod_base = OTHER; note = 2'-O-methyluridine-3'-phosphorothioate
  modified_base 2: mod_base = OTHER; note = 2'-O-methyluridine-3'-phosphorothioate
  modified_base 3: mod_base = OTHER; note = 2'-O-methyluridine-3'-phosphate
  modified_base 4: mod_base = OTHER; note = 2'-O-methylguanosine-3'-phosphate
  modified_base 5: mod_base = OTHER; note = 2'-O-methyluridine-3'-phosphate
  modified_base 6: mod_base = OTHER; note = 2'-O-methyladenosine-3'-phosphate
  modified_base 7: mod_base = OTHER; note = 2'-fluoroguanosine-3'-phosphate
  modified_base 8: mod_base = OTHER; note = 2'-fluorocytidine-3'-phosphate
  modified_base 9: mod_base = OTHER; note = 2'-fluoroadenosine-3'-phosphate
  modified_base 10: mod_base = OTHER; note = 2'-O-methyluridine-3'-phosphate
  modified_base 11: mod_base = OTHER; note = 2'-O-methyluridine-3'-phosphate
  modified_base 12: mod_base = OTHER; note = 2'-O-methyluridine-3'-phosphate
  modified_base 13: mod_base = OTHER; note = 2'-O-methyluridine-3'-phosphate
  modified_base 14: mod_base = OTHER; note = 2'-O-methyluridine-3'-phosphate
  modified_base 15: mod_base = OTHER; note = 2'-O-methyladenosine-3'-phosphate
  modified_base 16: mod_base = OTHER; note = 2'-O-methyluridine-3'-phosphate
  modified_base 17: mod_base = OTHER; note = 2'-O-methyluridine-3'-phosphate
  modified_base 18: mod_base = OTHER; note = 2'-O-methyladenosine-3'-phosphate
  modified_base 19: mod_base = OTHER; note = 2'-O-methyladenosine
tttgtagcatttttattaa

SEQ ID NO: 2422 - RNA, 21 nt, synthetic construct
  source 1..21: mol_type = other RNA
  modified_base 1: mod_base = OTHER; note = 2'-O-methyluridine-3'-phosphorothioate
  modified_base 2: mod_base = OTHER; note = 2'-fluorouridine-3'-phosphorothioate
  modified_base 3: mod_base = OTHER; note = 2'-O-methyladenosine-3'-phosphate
  modified_base 4: mod_base = OTHER; note = 2'-O-methyladenosine-3'-phosphate
  modified_base 5: mod_base = OTHER; note = 2'-O-methyluridine-3'-phosphate
  modified_base 6: mod_base = OTHER; note = 2'-fluoroadenosine-3'-phosphate
  modified_base 7: mod_base = OTHER; note = 2'-O-methyladenosine-3'-phosphate
  modified_base 8: mod_base = OTHER; note = 2'-O-methyladenosine-3'-phosphate
  modified_base 9: mod_base = OTHER; note = 2'-O-methyladenosine-3'-phosphate
  modified_base 10: mod_base = OTHER; note = 2'-O-methyladenosine-3'-phosphate
  modified_base 11: mod_base = OTHER; note = 2'-O-methyluridine-3'-phosphate
  modified_base 12: mod_base = OTHER; note = 2'-O-methylguanosine-3'-phosphate
  modified_base 13: mod_base = OTHER; note = 2'-O-methylcytidine-3'-phosphate
  modified_base 14: mod_base = OTHER; note = 2'-fluorouridine-3'-phosphate
  modified_base 15: mod_base = OTHER; note = 2'-O-methyladenosine-3'-phosphate
  modified_base 16: mod_base = OTHER; note = 2'-fluorocytidine-3'-phosphate
  modified_base 17: mod_base = OTHER; note = 2'-O-methyladenosine-3'-phosphate
  modified_base 18: mod_base = OTHER; note = 2'-O-methyladenosine-3'-phosphate
  modified_base 19: mod_base = OTHER; note = 2'-O-methyladenosine-3'-phosphorothioate
  modified_base 20: mod_base = OTHER; note = 2'-O-methyladenosine-3'-phosphorothioate
  modified_base 21: mod_base = OTHER; note = 2'-O-methylcytidine
ttaataaaaatgctacaaaac

SEQ ID NO: 2423 - RNA, 19 nt, synthetic construct
  source 1..19: mol_type = other RNA
  modified_base 1: mod_base = OTHER; note = 2'-O-methylguanosine-3'-phosphorothioate
  modified_base 2: mod_base = OTHER; note = 2'-O-methyluridine-3'-phosphorothioate
  modified_base 3: mod_base = OTHER; note = 2'-O-methyladenosine-3'-phosphate
  modified_base 4: mod_base = OTHER; note = 2'-O-methylguanosine-3'-phosphate
  modified_base 5: mod_base = OTHER; note = 2'-O-methylcytidine-3'-phosphate
  modified_base 6: mod_base = OTHER; note = 2'-O-methyladenosine-3'-phosphate
  modified_base 7: mod_base = OTHER; note = 2'-fluorouridine-3'-phosphate
  modified_base 8: mod_base = OTHER; note = 2'-fluorouridine-3'-phosphate
  modified_base 9: mod_base = OTHER; note = 2'-fluorouridine-3'-phosphate
  modified_base 10: mod_base = OTHER; note = 2'-O-methyluridine-3'-phosphate
  modified_base 11: mod_base = OTHER; note = 2'-O-methyluridine-3'-phosphate
  modified_base 12: mod_base = OTHER; note = 2'-O-methyladenosine-3'-phosphate
  modified_base 13: mod_base = OTHER; note = 2'-O-methyluridine-3'-phosphate
  modified_base 14: mod_base = OTHER; note = 2'-O-methyluridine-3'-phosphate
  modified_base 15: mod_base = OTHER; note = 2'-O-methyladenosine-3'-phosphate
  modified_base 16: mod_base = OTHER; note = 2'-O-methyladenosine-3'-phosphate
  modified_base 17: mod_base = OTHER; note = 2'-O-methyluridine-3'-phosphate
  modified_base 18: mod_base = OTHER; note = 2'-O-methyladenosine-3'-phosphate
  modified_base 19: mod_base = OTHER; note = 2'-O-methyluridine
gtagcatttttattaatat

SEQ ID NO: 2424 - RNA, 21 nt, synthetic construct
  source 1..21: mol_type = other RNA
  modified_base 1: mod_base = OTHER; note = 2'-O-methyladenosine-3'-phosphorothioate
  modified_base 2: mod_base = OTHER; note = 2'-fluorouridine-3'-phosphorothioate
  modified_base 3: mod_base = OTHER; note = 2'-O-methyladenosine-3'-phosphate
  modified_base 4: mod_base = OTHER; note = 2'-O-methyluridine-3'-phosphate
  modified_base 5: mod_base = OTHER; note = 2'-O-methyluridine-3'-phosphate
  modified_base 6: mod_base = OTHER; note = 2'-fluoroadenosine-3'-phosphate
  modified_base 7: mod_base = OTHER; note = 2'-O-methyladenosine-3'-phosphate
  modified_base 8: mod_base = OTHER; note = 2'-O-methyluridine-3'-phosphate
  modified_base 9: mod_base = OTHER; note = 2'-O-methyladenosine-3'-phosphate
  modified_base 10: mod_base = OTHER; note = 2'-O-methyladenosine-3'-phosphate
  modified_base 11: mod_base = OTHER; note = 2'-O-methyladenosine-3'-phosphate
  modified_base 12: mod_base = OTHER; note = 2'-O-methyladenosine-3'-phosphate
  modified_base 13: mod_base = OTHER; note = 2'-O-methyladenosine-3'-phosphate
  modified_base 14: mod_base = OTHER; note = 2'-fluorouridine-3'-phosphate
  modified_base 15: mod_base = OTHER; note = 2'-O-methylguanosine-3'-phosphate
  modified_base 16: mod_base = OTHER; note = 2'-fluorocytidine-3'-phosphate
  modified_base 17: mod_base = OTHER; note = 2'-O-methyluridine-3'-phosphate
  modified_base 18: mod_base = OTHER; note = 2'-O-methyladenosine-3'-phosphate
  modified_base 19: mod_base = OTHER; note = 2'-O-methylcytidine-3'-phosphorothioate
  modified_base 20: mod_base = OTHER; note = 2'-O-methyladenosine-3'-phosphorothioate
  modified_base 21: mod_base = OTHER; note = 2'-O-methyladenosine
atattaataaaaatgctacaa

SEQ ID NO: 2425 - RNA, 21 nt, synthetic construct
  source 1..21: mol_type = other RNA
  modified_base 1: mod_base = OTHER; note = 2'-O-methyladenosine-3'-phosphorothioate
  modified_base 2: mod_base = OTHER; note = 2'-O-methyladenosine-3'-phosphorothioate
  modified_base 3: mod_base = OTHER; note = 2'-O-methylguanosine-3'-phosphate
  modified_base 4: mod_base = OTHER; note = 2'-O-methyladenosine-3'-phosphate
  modified_base 5: mod_base = OTHER; note = 2'-O-methyluridine-3'-phosphate
  modified_base 6: mod_base = OTHER; note = 2'-O-methylcytidine-3'-phosphate
  modified_base 7: mod_base = OTHER; note = 2'-fluorocytidine-3'-phosphate
  modified_base 8: mod_base = OTHER; note = 2'-O-methyluridine-3'-phosphate
  modified_base 9: mod_base = OTHER; note = 2'-fluoroguanosine-3'-phosphate
  modified_base 10: mod_base = OTHER; note = 2'-fluorocytidine-3'-phosphate
  modified_base 11: mod_base = OTHER; note = 2'-fluoroadenosine-3'-phosphate
  modified_base 12: mod_base = OTHER; note = 2'-O-methyluridine-3'-phosphate
  modified_base 13: mod_base = OTHER; note = 2'-O-methylguanosine-3'-phosphate
  modified_base 14: mod_base = OTHER; note = 2'-O-methyluridine-3'-phosphate
  modified_base 15: mod_base = OTHER; note = 2'-O-methylcytidine-3'-phosphate
  modified_base 16: mod_base = OTHER; note = 2'-O-methyluridine-3'-phosphate
  modified_base 17: mod_base = OTHER; note = 2'-fluorouridine-3'-phosphate
  modified_base 18: mod_base = OTHER; note = 2'-O-methylcytidine-3'-phosphate
  modified_base 19: mod_base = OTHER; note = 2'-O-methylcytidine-3'-phosphate
  modified_base 20: mod_base = OTHER; note = 2'-O-methyladenosine-3'-phosphate
  modified_base 21: mod_base = OTHER; note = 2'-O-methyluridine
aagatcctgcatgtcttccat

SEQ ID NO: 2426 - RNA, 23 nt, synthetic construct
  source 1..23: mol_type = other RNA
  modified_base 1: mod_base = OTHER; note = 2'-O-methyladenosine-3'-phosphorothioate
  modified_base 2: mod_base = OTHER; note = 2'-fluorouridine-3'-phosphate
  modified_base 3: mod_base = OTHER; note = 2'-O-methylguanosine-3'-phosphate
  modified_base 4: mod_base = OTHER; note = 2'-O-methylguanosine-3'-phosphate
  modified_base 5: mod_base = OTHER; note = 2'-O-methyladenosine-3'-phosphate
  modified_base 6: mod_base = OTHER; note = 2'-fluoroadenosine-3'-phosphate
  modified_base 7: mod_base = OTHER; note = Guanine glycol nucleic acid-2'-phosphate
  modified_base 8: mod_base = OTHER; note = 2'-O-methyladenosine-3'-phosphate
  modified_base 9: mod_base = OTHER; note = 2'-O-methylcytidine-3'-phosphate
  modified_base 10: mod_base = OTHER; note = 2'-O-methyladenosine-3'-phosphate
  modified_base 11: mod_base = OTHER; note = 2'-O-methyluridine-3'-phosphate
  modified_base 12: mod_base = OTHER; note = 2'-O-methylguanosine-3'-phosphate
  modified_base 13: mod_base = OTHER; note = 2'-O-methylcytidine-3'-phosphate
  modified_base 14: mod_base = OTHER; note = 2'-fluoroadenosine-3'-phosphate
  modified_base 15: mod_base = OTHER; note = 2'-O-methylguanosine-3'-phosphate
  modified_base 16: mod_base = OTHER; note = 2'-fluoroguanosine-3'-phosphate
  modified_base 17: mod_base = OTHER; note = 2'-O-methyladenosine-3'-phosphate
  modified_base 18: mod_base = OTHER; note = 2'-O-methyluridine-3'-phosphate
  modified_base 19: mod_base = OTHER; note = 2'-O-methylcytidine-3'-phosphate
  modified_base 20: mod_base = OTHER; note = 2'-O-methyluridine-3'-phosphate
  modified_base 21: mod_base = OTHER; note = 2'-O-methyluridine-3'-phosphorothioate
  modified_base 22: mod_base = OTHER; note = 2'-O-methylguanosine-3'-phosphorothioate
  modified_base 23: mod_base = OTHER; note = 2'-O-methylguanosine
atggaagacatgcaggatcttgg

SEQ ID NO: 2427 - RNA, 21 nt, synthetic construct
  source 1..21: mol_type = other RNA
  modified_base 1: mod_base = OTHER; note = 2'-O-methyladenosine-3'-phosphorothioate
  modified_base 2: mod_base = OTHER; note = 2'-O-methyladenosine-3'-phosphorothioate
  modified_base 3: mod_base = OTHER; note = 2'-O-methylguanosine-3'-phosphate
  modified_base 4: mod_base = OTHER; note = 2'-O-methyladenosine-3'-phosphate
  modified_base 5: mod_base = OTHER; note = 2'-O-methyluridine-3'-phosphate
  modified_base 6: mod_base = OTHER; note = 2'-O-methylcytidine-3'-phosphate
  modified_base 7: mod_base = OTHER; note = 2'-fluorocytidine-3'-phosphate
  modified_base 8: mod_base = OTHER; note = 2'-O-methyluridine-3'-phosphate
  modified_base 9: mod_base = OTHER; note = 2'-fluoroguanosine-3'-phosphate
  modified_base 10: mod_base = OTHER; note = 2'-fluorocytidine-3'-phosphate
  modified_base 11: mod_base = OTHER; note = 2'-fluoroadenosine-3'-phosphate
  modified_base 12: mod_base = OTHER; note = 2'-O-methyluridine-3'-phosphate
  modified_base 13: mod_base = OTHER; note = 2'-O-methylguanosine-3'-phosphate
  modified_base 14: mod_base = OTHER; note = 2'-O-methyluridine-3'-phosphate
  modified_base 15: mod_base = OTHER; note = 2'-O-methylcytidine-3'-phosphate
  modified_base 16: mod_base = OTHER; note = 2'-O-methyluridine-3'-phosphate
  modified_base 17: mod_base = OTHER; note = 2'-fluorouridine-3'-phosphate
  modified_base 18: mod_base = OTHER; note = 2'-O-methylcytidine-3'-phosphate
  modified_base 19: mod_base = OTHER; note = 2'-O-methylcytidine-3'-phosphate
  modified_base 20: mod_base = OTHER; note = 2'-O-methyladenosine-3'-phosphate
  modified_base 21: mod_base = OTHER; note = 2'-O-methyluridine
aagatcctgcatgtcttccat

SEQ ID NO: 2428 - RNA, 23 nt, synthetic construct
  source 1..23: mol_type = other RNA
  modified_base 1: mod_base = OTHER; note 5'-(E)-vinylphosphonate-2'-O-methyladenosine-3'-phosphoroth ioate
  modified_base 2: mod_base = OTHER; note = 2'-fluorouridine-3'-phosphorothioate
  modified_base 3: mod_base = OTHER; note = 2'-O-methylguanosine-3'-phosphate
  modified_base 4: mod_base = OTHER; note = 2'-O-methylguanosine-3'-phosphate
  modified_base 5: mod_base = OTHER; note = 2'-O-methyladenosine-3'-phosphate
  modified_base 6: mod_base = OTHER; note = 2'-fluoroadenosine-3'-phosphate
  modified_base 7: mod_base = OTHER; note = 2'-O-methylguanosine-3'-phosphate
  modified_base 8: mod_base = OTHER; note = 2'-O-methyladenosine-3'-phosphate
  modified_base 9: mod_base = OTHER; note = 2'-O-methylcytidine-3'-phosphate
  modified_base 10: mod_base = OTHER; note = 2'-O-methyladenosine-3'-phosphate
  modified_base 11: mod_base = OTHER; note = 2'-O-methyluridine-3'-phosphate
  modified_base 12: mod_base = OTHER; note = 2'-O-methylguanosine-3'-phosphate
  modified_base 13: mod_base = OTHER; note = 2'-O-methylcytidine-3'-phosphate
  modified_base 14: mod_base = OTHER; note = 2'-fluoroadenosine-3'-phosphate
  modified_base 15: mod_base = OTHER; note = 2'-O-methylguanosine-3'-phosphate
  modified_base 16: mod_base = OTHER; note = 2'-fluoroguanosine-3'-phosphate
  modified_base 17: mod_base = OTHER; note = 2'-O-methyladenosine-3'-phosphate
  modified_base 18: mod_base = OTHER; note = 2'-O-methyluridine-3'-phosphate
  modified_base 19: mod_base = OTHER; note = 2'-O-methylcytidine-3'-phosphate
  modified_base 20: mod_base = OTHER; note = 2'-O-methyluridine-3'-phosphate
  modified_base 21: mod_base = OTHER; note = 2'-O-methyluridine-3'-phosphorothioate
  modified_base 22: mod_base = OTHER; note = 2'-O-methylguanosine-3'-phosphorothioate
  modified_base 23: mod_base = OTHER; note = 2'-O-methylguanosine
atggaagacatgcaggatcttgg

SEQ ID NO: 2429 - RNA, 21 nt, synthetic construct
  source 1..21: mol_type = other RNA
  modified_base 1: mod_base = OTHER; note = 2'-O-methyluridine-3'-phosphorothioate
  modified_base 2: mod_base = OTHER; note = 2'-O-methylguanosine-3'-phosphorothioate
  modified_base 3: mod_base = OTHER; note = 2'-O-methylguanosine-3'-phosphate
  modified_base 4: mod_base = OTHER; note = 2'-O-methyladenosine-3'-phosphate
  modified_base 5: mod_base = OTHER; note = 2'-O-methylguanosine-3'-phosphate
  modified_base 6: mod_base = OTHER; note = 2'-O-methylguanosine-3'-phosphate
  modified_base 7: mod_base = OTHER; note = 2'-fluorocytidine-3'-phosphate
  modified_base 8: mod_base = OTHER; note = 2'-O-methyluridine-3'-phosphate
  modified_base 9: mod_base = OTHER; note = 2'-fluorouridine-3'-phosphate
  modified_base 10: mod_base = OTHER; note = 2'-fluoroadenosine-3'-phosphate
  modified_base 11: mod_base = OTHER; note = 2'-fluoroguanosine-3'-phosphate
  modified_base 12: mod_base = OTHER; note = 2'-O-methylcytidine-3'-phosphate
  modified_base 13: mod_base = OTHER; note = 2'-O-methyluridine-3'-phosphate
  modified_base 14: mod_base = OTHER; note = 2'-O-methyluridine-3'-phosphate
  modified_base 15: mod_base = OTHER; note = 2'-O-methyluridine-3'-phosphate
  modified_base 16: mod_base = OTHER; note = 2'-O-methylcytidine-3'-phosphate
  modified_base 17: mod_base = OTHER; note = 2'-fluorouridine-3'-phosphate
  modified_base 18: mod_base = OTHER; note = 2'-O-methylguanosine-3'-phosphate
  modified_base 19: mod_base = OTHER; note = 2'-O-methylguanosine-3'-phosphate
  modified_base 20: mod_base = OTHER; note = 2'-O-methyladenosine-3'-phosphate
  modified_base 21: mod_base = OTHER; note = 2'-O-methyluridine
tggaggcttagctttctggat

SEQ ID NO: 2430 - RNA, 23 nt, synthetic construct
  source 1..23: mol_type = other RNA
  modified_base 1: mod_base = OTHER; note = 2'-O-methyladenosine-3'-phosphorothioate
  modified_base 2: mod_base = OTHER; note = 2'-fluorouridine-3'-phosphorothioate
  modified_base 3: mod_base = OTHER; note = 2'-fluorocytidine-3'-phosphate
  modified_base 4: mod_base = OTHER; note = 2'-fluorocytidine-3'-phosphate
  modified_base 5: mod_base = OTHER; note = 2'-O-methyladenosine-3'-phosphate
  modified_base 6: mod_base = OTHER; note = 2'-fluoroguanosine-3'-phosphate
  modified_base 7: mod_base = OTHER; note = 2'-O-methyladenosine-3'-phosphate
  modified_base 8: mod_base = OTHER; note = 2'-O-methyladenosine-3'-phosphate
  modified_base 9: mod_base = OTHER; note = 2'-O-methyladenosine-3'-phosphate
  modified_base 10: mod_base = OTHER; note = 2'-O-methylguanosine-3'-phosphate
  modified_base 11: mod_base = OTHER; note = 2'-O-methylcytidine-3'-phosphate
  modified_base 12: mod_base = OTHER; note = 2'-O-methyluridine-3'-phosphate
  modified_base 13: mod_base = OTHER; note = 2'-O-methyladenosine-3'-phosphate
  modified_base 14: mod_base = OTHER; note = 2'-fluoroadenosine-3'-phosphate
  modified_base 15: mod_base = OTHER; note = 2'-O-methylguanosine-3'-phosphate
  modified_base 16: mod_base = OTHER; note = 2'-fluorocytidine-3'-phosphate
  modified_base 17: mod_base = OTHER; note = 2'-O-methylcytidine-3'-phosphate
  modified_base 18: mod_base = OTHER; note = 2'-O-methyluridine-3'-phosphate
  modified_base 19: mod_base = OTHER; note = 2'-O-methylcytidine-3'-phosphate
  modified_base 20: mod_base = OTHER; note = 2'-O-methylcytidine-3'-phosphate
  modified_base 21: mod_base = OTHER; note = 2'-O-methyladenosine-3'-phosphorothioate
  modified_base 22: mod_base = OTHER; note = 2'-O-methyluridine-3'-phosphorothioate
  modified_base 23: mod_base = OTHER; note = 2'-O-methyluridine
atccagaaagctaagcctccatt

SEQ ID NO: 2431 - RNA, 21 nt, synthetic construct
  source 1..21: mol_type = other RNA
  modified_base 1: mod_base = OTHER; note = 2'-O-methyluridine-3'-phosphorothioate
  modified_base 2: mod_base = OTHER; note = 2'-O-methylguanosine-3'-phosphorothioate
  modified_base 3: mod_base = OTHER; note = 2'-O-methylguanosine-3'-phosphate
  modified_base 4: mod_base = OTHER; note = 2'-O-methyladenosine-3'-phosphate
  modified_base 5: mod_base = OTHER; note = 2'-O-methylguanosine-3'-phosphate
  modified_base 6: mod_base = OTHER; note = 2'-O-methylguanosine-3'-phosphate
  modified_base 7: mod_base = OTHER; note = 2'-fluorocytidine-3'-phosphate
  modified_base 8: mod_base = OTHER; note = 2'-O-methyluridine-3'-phosphate
  modified_base 9: mod_base = OTHER; note = 2'-fluorouridine-3'-phosphate
  modified_base 10: mod_base = OTHER; note = 2'-fluoroadenosine-3'-phosphate
  modified_base 11: mod_base = OTHER; note = 2'-fluoroguanosine-3'-phosphate
  modified_base 12: mod_base = OTHER; note = 2'-O-methylcytidine-3'-phosphate
  modified_base 13: mod_base = OTHER; note = 2'-O-methyluridine-3'-phosphate
  modified_base 14: mod_base = OTHER; note = 2'-O-methyluridine-3'-phosphate
  modified_base 15: mod_base = OTHER; note = 2'-O-methyluridine-3'-phosphate
  modified_base 16: mod_base = OTHER; note = 2'-O-methylcytidine-3'-phosphate
  modified_base 17: mod_base = OTHER; note = 2'-fluorouridine-3'-phosphate
  modified_base 18: mod_base = OTHER; note = 2'-O-methylguanosine-3'-phosphate
  modified_base 19: mod_base = OTHER; note = 2'-O-methylguanosine-3'-phosphate
  modified_base 20: mod_base = OTHER; note = 2'-O-methyladenosine-3'-phosphate
  modified_base 21: mod_base = OTHER; note = 2'-O-methyluridine
tggaggcttagctttctggat

SEQ ID NO: 2432 - RNA, 23 nt, synthetic construct
  source 1..23: mol_type = other RNA
  modified_base 1: mod_base = OTHER; note = 2'-O-methyladenosine-3'-phosphorothioate
  modified_base 2: mod_base = OTHER; note = 2'-fluorouridine-3'-phosphorothioate
  modified_base 3: mod_base = OTHER; note = 2'-fluorocytidine-3'-phosphate
  modified_base 4: mod_base = OTHER; note = 2'-fluorocytidine-3'-phosphate
  modified_base 5: mod_base = OTHER; note = 2'-O-methyladenosine-3'-phosphate
  modified_base 6: mod_base = OTHER; note = 2'-fluoroguanosine-3'-phosphate
  modified_base 7: mod_base = OTHER; note = adenine glycol nucleic acid-2'-phosphate
  modified_base 8: mod_base = OTHER; note = 2'-O-methyladenosine-3'-phosphate
  modified_base 9: mod_base = OTHER; note = 2'-O-methyladenosine-3'-phosphate
  modified_base 10: mod_base = OTHER; note = 2'-O-methylguanosine-3'-phosphate
  modified_base 11: mod_base = OTHER; note = 2'-O-methylcytidine-3'-phosphate
  modified_base 12: mod_base = OTHER; note = 2'-O-methyluridine-3'-phosphate
  modified_base 13: mod_base = OTHER; note = 2'-O-methyladenosine-3'-phosphate
  modified_base 14: mod_base = OTHER; note = 2'-fluoroadenosine-3'-phosphate
  modified_base 15: mod_base = OTHER; note = 2'-O-methylguanosine-3'-phosphate
  modified_base 16: mod_base = OTHER; note = 2'-fluorocytidine-3'-phosphate
  modified_base 17: mod_base = OTHER; note = 2'-O-methylcytidine-3'-phosphate
  modified_base 18: mod_base = OTHER; note = 2'-O-methyluridine-3'-phosphate
  modified_base 19: mod_base = OTHER; note = 2'-O-methylcytidine-3'-phosphate
  modified_base 20: mod_base = OTHER; note = 2'-O-methylcytidine-3'-phosphate
  modified_base 21: mod_base = OTHER; note = 2'-O-methyladenosine-3'-phosphorothioate
  modified_base 22: mod_base = OTHER; note = 2'-O-methyluridine-3'-phosphorothioate
  modified_base 23: mod_base = OTHER; note = 2'-O-methyluridine
atccagaaagctaagcctccatt

SEQ ID NO: 2433 - RNA, 21 nt, synthetic construct
  source 1..21: mol_type = other RNA
  modified_base 1: mod_base = OTHER; note = 2'-O-methyluridine-3'-phosphorothioate
  modified_base 2: mod_base = OTHER; note = 2'-O-methylguanosine-3'-phosphorothioate
  modified_base 3: mod_base = OTHER; note = 2'-O-methylguanosine-3'-phosphate
  modified_base 4: mod_base = OTHER; note = 2'-O-methyladenosine-3'-phosphate
  modified_base 5: mod_base = OTHER; note = 2'-O-methylguanosine-3'-phosphate
  modified_base 6: mod_base = OTHER; note = 2'-O-methylguanosine-3'-phosphate
  modified_base 7: mod_base = OTHER; note = 2'-fluorocytidine-3'-phosphate
  modified_base 8: mod_base = OTHER; note = 2'-O-methyluridine-3'-phosphate
  modified_base 9: mod_base = OTHER; note = 2'-fluorouridine-3'-phosphate
  modified_base 10: mod_base = OTHER; note = 2'-fluoroadenosine-3'-phosphate
  modified_base 11: mod_base = OTHER; note = 2'-fluoroguanosine-3'-phosphate
  modified_base 12: mod_base = OTHER; note = 2'-O-methylcytidine-3'-phosphate
  modified_base 13: mod_base = OTHER; note = 2'-O-methyluridine-3'-phosphate
  modified_base 14: mod_base = OTHER; note = 2'-O-methyluridine-3'-phosphate
  modified_base 15: mod_base = OTHER; note = 2'-O-methyluridine-3'-phosphate
  modified_base 16: mod_base = OTHER; note = 2'-O-methylcytidine-3'-phosphate
  modified_base 17: mod_base = OTHER; note = 2'-fluorouridine-3'-phosphate
  modified_base 18: mod_base = OTHER; note = 2'-O-methylguanosine-3'-phosphate
  modified_base 19: mod_base = OTHER; note = 2'-O-methylguanosine-3'-phosphate
  modified_base 20: mod_base = OTHER; note = 2'-O-methyladenosine-3'-phosphate
  modified_base 21: mod_base = OTHER; note = 2'-O-methyluridine
tggaggcttagctttctggat

SEQ ID NO: 2434 - RNA, 23 nt, synthetic construct
  source 1..23: mol_type = other RNA
  modified_base 1: mod_base = OTHER; note 5'-(E)-vinylphosphonate-2'-O-methyladenosine-3'-phosphoroth ioate
  modified_base 2: mod_base = OTHER; note = 2'-fluorouridine-3'-phosphorothioate
  modified_base 3: mod_base = OTHER; note = 2'-fluorocytidine-3'-phosphate
  modified_base 4: mod_base = OTHER; note = 2'-fluorocytidine-3'-phosphate
  modified_base 5: mod_base = OTHER; note = 2'-O-methyladenosine-3'-phosphate
  modified_base 6: mod_base = OTHER; note = 2'-fluoroguanosine-3'-phosphate
  modified_base 7: mod_base = OTHER; note = 2'-O-methyladenosine-3'-phosphate
  modified_base 8: mod_base = OTHER; note = 2'-O-methyladenosine-3'-phosphate
  modified_base 9: mod_base = OTHER; note = 2'-O-methyladenosine-3'-phosphate
  modified_base 10: mod_base = OTHER; note = 2'-O-methylguanosine-3'-phosphate
  modified_base 11: mod_base = OTHER; note = 2'-O-methylcytidine-3'-phosphate
  modified_base 12: mod_base = OTHER; note = 2'-O-methyluridine-3'-phosphate
  modified_base 13: mod_base = OTHER; note = 2'-O-methyladenosine-3'-phosphate
  modified_base 14: mod_base = OTHER; note = 2'-fluoroadenosine-3'-phosphate
  modified_base 15: mod_base = OTHER; note = 2'-O-methylguanosine-3'-phosphate
  modified_base 16: mod_base = OTHER; note = 2'-fluorocytidine-3'-phosphate
  modified_base 17: mod_base = OTHER; note = 2'-O-methylcytidine-3'-phosphate
  modified_base 18: mod_base = OTHER; note = 2'-O-methyluridine-3'-phosphate
  modified_base 19: mod_base = OTHER; note = 2'-O-methylcytidine-3'-phosphate
  modified_base 20: mod_base = OTHER; note = 2'-O-methylcytidine-3'-phosphate
  modified_base 21: mod_base = OTHER; note = 2'-O-methyladenosine-3'-phosphorothioate
  modified_base 22: mod_base = OTHER; note = 2'-O-methyluridine-3'-phosphorothioate
  modified_base 23: mod_base = OTHER; note = 2'-O-methyluridine
atccagaaagctaagcctccatt

SEQ ID NO: 2435 - RNA, 21 nt, synthetic construct
  source 1..21: mol_type = other RNA
  modified_base 1: mod_base = OTHER; note = 2'-O-methylcytidine-3'-phosphorothioate
  modified_base 2: mod_base = OTHER; note = 2'-O-methyluridine-3'-phosphorothioate
  modified_base 3: mod_base = OTHER; note = 2'-O-methyluridine-3'-phosphate
  modified_base 4: mod_base = OTHER; note = 2'-O-methyluridine-3'-phosphate
  modified_base 5: mod_base = OTHER; note = 2'-O-methyluridine-3'-phosphate
  modified_base 6: mod_base = OTHER; note = 2'-O-methylguanosine-3'-phosphate
  modified_base 7: mod_base = OTHER; note = 2'-fluorouridine-3'-phosphate
  modified_base 8: mod_base = OTHER; note = 2'-O-methyladenosine-3'-phosphate
  modified_base 9: mod_base = OTHER; note = 2'-fluoroadenosine-3'-phosphate
  modified_base 10: mod_base = OTHER; note = 2'-fluorocytidine-3'-phosphate
  modified_base 11: mod_base = OTHER; note = 2'-fluorouridine-3'-phosphate
  modified_base 12: mod_base = OTHER; note = 2'-O-methyluridine-3'-phosphate
  modified_base 13: mod_base = OTHER; note = 2'-O-methylguanosine-3'-phosphate
  modified_base 14: mod_base = OTHER; note = 2'-O-methyladenosine-3'-phosphate
  modified_base 15: mod_base = OTHER; note = 2'-O-methyladenosine-3'-phosphate
  modified_base 16: mod_base = OTHER; note = 2'-O-methylguanosine-3'-phosphate
  modified_base 17: mod_base = OTHER; note = 2'-fluoroadenosine-3'-phosphate
  modified_base 18: mod_base = OTHER; note = 2'-O-methyluridine-3'-phosphate
  modified_base 19: mod_base = OTHER; note = 2'-O-methyladenosine-3'-phosphate
  modified_base 20: mod_base = OTHER; note = 2'-O-methyluridine-3'-phosphate
  modified_base 21: mod_base = OTHER; note = 2'-O-methyluridine
cttttgtaacttgaagatatt

SEQ ID NO: 2436 - RNA, 23 nt, synthetic construct
  source 1..23: mol_type = other RNA
  modified_base 1: mod_base = OTHER; note = 2'-O-methyladenosine-3'-phosphorothioate
  modified_base 2: mod_base = OTHER; note = 2'-fluoroadenosine-3'-phosphorothioate
  modified_base 3: mod_base = OTHER; note = 2'-O-methyluridine-3'-phosphate
  modified_base 4: mod_base = OTHER; note = 2'-O-methyladenosine-3'-phosphate
  modified_base 5: mod_base = OTHER; note = 2'-O-methyluridine-3'-phosphate
  modified_base 6: mod_base = OTHER; note = 2'-fluorocytidine-3'-phosphate
  modified_base 7: mod_base = OTHER; note = 2'-O-methyluridine-3'-phosphate
  modified_base 8: mod_base = OTHER; note = 2'-O-methyluridine-3'-phosphate
  modified_base 9: mod_base = OTHER; note = 2'-O-methylcytidine-3'-phosphate
  modified_base 10: mod_base = OTHER; note = 2'-O-methyladenosine-3'-phosphate
  modified_base 11: mod_base = OTHER; note = 2'-O-methyladenosine-3'-phosphate
  modified_base 12: mod_base = OTHER; note = 2'-O-methylguanosine-3'-phosphate
  modified_base 13: mod_base = OTHER; note = 2'-O-methyluridine-3'-phosphate
  modified_base 14: mod_base = OTHER; note = 2'-fluorouridine-3'-phosphate
  modified_base 15: mod_base = OTHER; note = 2'-O-methyladenosine-3'-phosphate
  modified_base 16: mod_base = OTHER; note = 2'-fluorocytidine-3'-phosphate
  modified_base 17: mod_base = OTHER; note = 2'-O-methyladenosine-3'-phosphate
  modified_base 18: mod_base = OTHER; note = 2'-O-methyladenosine-3'-phosphate
  modified_base 19: mod_base = OTHER; note = 2'-O-methyladenosine-3'-phosphate
  modified_base 20: mod_base = OTHER; note = 2'-O-methyladenosine-3'-phosphate
  modified_base 21: mod_base = OTHER; note = 2'-O-methylguanosine-3'-phosphorothioate
  modified_base 22: mod_base = OTHER; note = 2'-O-methylcytidine-3'-phosphorothioate
  modified_base 23: mod_base = OTHER; note = 2'-O-methyladenosine
aatatcttcaagttacaaaagca

SEQ ID NO: 2437 - RNA, 21 nt, synthetic construct
  source 1..21: mol_type = other RNA
  modified_base 1: mod_base = OTHER; note = 2'-O-methylcytidine-3'-phosphorothioate
  modified_base 2: mod_base = OTHER; note = 2'-O-methyluridine-3'-phosphorothioate
  modified_base 3: mod_base = OTHER; note = 2'-O-methyluridine-3'-phosphate
  modified_base 4: mod_base = OTHER; note = 2'-O-methyluridine-3'-phosphate
  modified_base 5: mod_base = OTHER; note = 2'-O-methyluridine-3'-phosphate
  modified_base 6: mod_base = OTHER; note = 2'-O-methylguanosine-3'-phosphate
  modified_base 7: mod_base = OTHER; note = 2'-fluorouridine-3'-phosphate
  modified_base 8: mod_base = OTHER; note = 2'-O-methyladenosine-3'-phosphate
  modified_base 9: mod_base = OTHER; note = 2'-fluoroadenosine-3'-phosphate
  modified_base 10: mod_base = OTHER; note = 2'-fluorocytidine-3'-phosphate
  modified_base 11: mod_base = OTHER; note = 2'-fluorouridine-3'-phosphate
  modified_base 12: mod_base = OTHER; note = 2'-O-methyluridine-3'-phosphate
  modified_base 13: mod_base = OTHER; note = 2'-O-methylguanosine-3'-phosphate
  modified_base 14: mod_base = OTHER; note = 2'-O-methyladenosine-3'-phosphate
  modified_base 15: mod_base = OTHER; note = 2'-O-methyladenosine-3'-phosphate
  modified_base 16: mod_base = OTHER; note = 2'-O-methylguanosine-3'-phosphate
  modified_base 17: mod_base = OTHER; note = 2'-fluoroadenosine-3'-phosphate
  modified_base 18: mod_base = OTHER; note = 2'-O-methyluridine-3'-phosphate
  modified_base 19: mod_base = OTHER; note = 2'-O-methyladenosine-3'-phosphate
  modified_base 20: mod_base = OTHER; note = 2'-O-methyluridine-3'-phosphate
  modified_base 21: mod_base = OTHER; note = 2'-O-methyluridine
cttttgtaacttgaagatatt

SEQ ID NO: 2438 - RNA, 23 nt, synthetic construct
  source 1..23: mol_type = other RNA
  modified_base 1: mod_base = OTHER; note 5'-(E)-vinylphosphonate-2'-O-methyladenosine-3'-phosphoroth ioate
  modified_base 2: mod_base = OTHER; note = 2'-fluoroadenosine-3'-phosphorothioate
  modified_base 3: mod_base = OTHER; note = 2'-O-methyluridine-3'-phosphate
  modified_base 4: mod_base = OTHER; note = 2'-fluoroadenosine-3'-phosphate
  modified_base 5: mod_base = OTHER; note = 2'-fluorouridine-3'-phosphate
  modified_base 6: mod_base = OTHER; note = 2'-fluorocytidine-3'-phosphate
  modified_base 7: mod_base = OTHER; note = 2'-O-methyluridine-3'-phosphate
  modified_base 8: mod_base = OTHER; note = 2'-O-methyluridine-3'-phosphate
  modified_base 9: mod_base = OTHER; note = 2'-O-methylcytidine-3'-phosphate
  modified_base 10: mod_base = OTHER; note = 2'-O-methyladenosine-3'-phosphate
  modified_base 11: mod_base = OTHER; note = 2'-O-methyladenosine-3'-phosphate
  modified_base 12: mod_base = OTHER; note = 2'-O-methylguanosine-3'-phosphate
  modified_base 13: mod_base = OTHER; note = 2'-O-methyluridine-3'-phosphate
  modified_base 14: mod_base = OTHER; note = 2'-fluorouridine-3'-phosphate
  modified_base 15: mod_base = OTHER; note = 2'-O-methyladenosine-3'-phosphate
  modified_base 16: mod_base = OTHER; note = 2'-fluorocytidine-3'-phosphate
  modified_base 17: mod_base = OTHER; note = 2'-O-methyladenosine-3'-phosphate
  modified_base 18: mod_base = OTHER; note = 2'-O-methyladenosine-3'-phosphate
  modified_base 19: mod_base = OTHER; note = 2'-O-methyladenosine-3'-phosphate
  modified_base 20: mod_base = OTHER; note = 2'-O-methyladenosine-3'-phosphate
  modified_base 21: mod_base = OTHER; note = 2'-O-methylguanosine-3'-phosphorothioate
  modified_base 22: mod_base = OTHER; note = 2'-O-methylcytidine-3'-phosphorothioate
  modified_base 23: mod_base = OTHER; note = 2'-O-methyladenosine
aatatcttcaagttacaaaagca

SEQ ID NO: 2439 - RNA, 21 nt, synthetic construct
  source 1..21: mol_type = other RNA
  modified_base 1: mod_base = OTHER; note = 2'-O-methylcytidine-3'-phosphorothioate
  modified_base 2: mod_base = OTHER; note = 2'-O-methyluridine-3'-phosphorothioate
  modified_base 3: mod_base = OTHER; note = 2'-O-methyluridine-3'-phosphate
  modified_base 4: mod_base = OTHER; note = 2'-O-methyluridine-3'-phosphate
  modified_base 5: mod_base = OTHER; note = 2'-O-methyluridine-3'-phosphate
  modified_base 6: mod_base = OTHER; note = 2'-O-methylguanosine-3'-phosphate
  modified_base 7: mod_base = OTHER; note = 2'-fluorouridine-3'-phosphate
  modified_base 8: mod_base = OTHER; note = 2'-O-methyladenosine-3'-phosphate
  modified_base 9: mod_base = OTHER; note = 2'-fluoroadenosine-3'-phosphate
  modified_base 10: mod_base = OTHER; note = 2'-fluorocytidine-3'-phosphate
  modified_base 11: mod_base = OTHER; note = 2'-fluorouridine-3'-phosphate
  modified_base 12: mod_base = OTHER; note = 2'-O-methyluridine-3'-phosphate
  modified_base 13: mod_base = OTHER; note = 2'-O-methylguanosine-3'-phosphate
  modified_base 14: mod_base = OTHER; note = 2'-O-methyladenosine-3'-phosphate
  modified_base 15: mod_base = OTHER; note = 2'-O-methyladenosine-3'-phosphate
  modified_base 16: mod_base = OTHER; note = 2'-O-methylguanosine-3'-phosphate
  modified_base 17: mod_base = OTHER; note = 2'-fluoroadenosine-3'-phosphate
  modified_base 18: mod_base = OTHER; note = 2'-O-methyluridine-3'-phosphate
  modified_base 19: mod_base = OTHER; note = 2'-O-methyladenosine-3'-phosphate
  modified_base 20: mod_base = OTHER; note = 2'-O-methyluridine-3'-phosphate
  modified_base 21: mod_base = OTHER; note = 2'-O-methyluridine
cttttgtaacttgaagatatt

SEQ ID NO: 2440 - RNA, 23 nt, synthetic construct
  source 1..23: mol_type = other RNA
  modified_base 1: mod_base = OTHER; note 5'-(E)-vinylphosphonate-2'-O-methyladenosine-3'-phosphoroth ioate
  modified_base 2: mod_base = OTHER; note = 2'-fluoroadenosine-3'-phosphorothioate
  modified_base 3: mod_base = OTHER; note = 2'-O-methyluridine-3'-phosphate
  modified_base 4: mod_base = OTHER; note = 2'-fluoroadenosine-3'-phosphate
  modified_base 5: mod_base = OTHER; note = 2'-fluorouridine-3'-phosphate
  modified_base 6: mod_base = OTHER; note = 2'-fluorocytidine-3'-phosphate
  modified_base 7: mod_base = OTHER; note = Uracil glycol nucleic acid-2'-phosphate
  modified_base 8: mod_base = OTHER; note = 2'-O-methyluridine-3'-phosphate
  modified_base 9: mod_base = OTHER; note = 2'-O-methylcytidine-3'-phosphate
  modified_base 10: mod_base = OTHER; note = 2'-O-methyladenosine-3'-phosphate
  modified_base 11: mod_base = OTHER; note = 2'-O-methyladenosine-3'-phosphate
  modified_base 12: mod_base = OTHER; note = 2'-O-methylguanosine-3'-phosphate
  modified_base 13: mod_base = OTHER; note = 2'-O-methyluridine-3'-phosphate
  modified_base 14: mod_base = OTHER; note = 2'-fluorouridine-3'-phosphate
  modified_base 15: mod_base = OTHER; note = 2'-O-methyladenosine-3'-phosphate
  modified_base 16: mod_base = OTHER; note = 2'-fluorocytidine-3'-phosphate
  modified_base 17: mod_base = OTHER; note = 2'-O-methyladenosine-3'-phosphate
  modified_base 18: mod_base = OTHER; note = 2'-O-methyladenosine-3'-phosphate
  modified_base 19: mod_base = OTHER; note = 2'-O-methyladenosine-3'-phosphate
  modified_base 20: mod_base = OTHER; note = 2'-O-methyladenosine-3'-phosphate
  modified_base 21: mod_base = OTHER; note = 2'-O-methylguanosine-3'-phosphorothioate
  modified_base 22: mod_base = OTHER; note = 2'-O-methylcytidine-3'-phosphorothioate
  modified_base 23: mod_base = OTHER; note = 2'-O-methyladenosine
aatatcttcaagttacaaaagca

SEQ ID NO: 2441 - RNA, 21 nt, synthetic construct
  source 1..21: mol_type = other RNA
  modified_base 1: mod_base = OTHER; note = 2'-O-methylcytidine-3'-phosphorothioate
  modified_base 2: mod_base = OTHER; note = 2'-O-methyluridine-3'-phosphorothioate
  modified_base 3: mod_base = OTHER; note = 2'-O-methyluridine-3'-phosphate
  modified_base 4: mod_base = OTHER; note = 2'-O-methyluridine-3'-phosphate
  modified_base 5: mod_base = OTHER; note = 2'-O-methyluridine-3'-phosphate
  modified_base 6: mod_base = OTHER; note = 2'-O-methylguanosine-3'-phosphate
  modified_base 7: mod_base = OTHER; note = 2'-fluorouridine-3'-phosphate
  modified_base 8: mod_base = OTHER; note = 2'-O-methyladenosine-3'-phosphate
  modified_base 9: mod_base = OTHER; note = 2'-fluoroadenosine-3'-phosphate
  modified_base 10: mod_base = OTHER; note = 2'-O-methylcytidine-3'-phosphate
  modified_base 11: mod_base = OTHER; note = 2'-fluorouridine-3'-phosphate
  modified_base 12: mod_base = OTHER; note = 2'-O-methyluridine-3'-phosphate
  modified_base 13: mod_base = OTHER; note = 2'-O-methylguanosine-3'-phosphate
  modified_base 14: mod_base = OTHER; note = 2'-O-methyladenosine-3'-phosphate
  modified_base 15: mod_base = OTHER; note = 2'-O-methyladenosine-3'-phosphate
  modified_base 16: mod_base = OTHER; note = 2'-O-methylguanosine-3'-phosphate
  modified_base 17: mod_base = OTHER; note = 2'-fluoroadenosine-3'-phosphate
  modified_base 18: mod_base = OTHER; note = 2'-O-methyluridine-3'-phosphate
  modified_base 19: mod_base = OTHER; note = 2'-O-methyladenosine-3'-phosphate
  modified_base 20: mod_base = OTHER; note = 2'-O-methyluridine-3'-phosphate
  modified_base 21: mod_base = OTHER; note = 2'-O-methyluridine
cttttgtaacttgaagatatt

SEQ ID NO: 2442 - RNA, 23 nt, synthetic construct
  source 1..23: mol_type = other RNA
  modified_base 1: mod_base = OTHER; note = 2'-O-methyladenosine-3'-phosphorothioate
  modified_base 2: mod_base = OTHER; note = 2'-fluoroadenosine-3'-phosphorothioate
  modified_base 3: mod_base = OTHER; note = 2'-fluorouridine-3'-phosphate
  modified_base 4: mod_base = OTHER; note = 2'-fluoroadenosine-3'-phosphate
  modified_base 5: mod_base = OTHER; note = 2'-O-methyluridine-3'-phosphate
  modified_base 6: mod_base = OTHER; note = 2'-fluorocytidine-3'-phosphate
  modified_base 7: mod_base = OTHER; note = 2'-O-methyluridine-3'-phosphate
  modified_base 8: mod_base = OTHER; note = 2'-O-methyluridine-3'-phosphate
  modified_base 9: mod_base = OTHER; note = 2'-O-methylcytidine-3'-phosphate
  modified_base 10: mod_base = OTHER; note = 2'-O-methyladenosine-3'-phosphate
  modified_base 11: mod_base = OTHER; note = 2'-O-methyladenosine-3'-phosphate
  modified_base 12: mod_base = OTHER; note = 2'-O-methylguanosine-3'-phosphate
  modified_base 13: mod_base = OTHER; note = 2'-O-methyluridine-3'-phosphate
  modified_base 14: mod_base = OTHER; note = 2'-fluorouridine-3'-phosphate
  modified_base 15: mod_base = OTHER; note = 2'-O-methyladenosine-3'-phosphate
  modified_base 16: mod_base = OTHER; note = 2'-fluorocytidine-3'-phosphate
  modified_base 17: mod_base = OTHER; note = 2'-O-methyladenosine-3'-phosphate
  modified_base 18: mod_base = OTHER; note = 2'-O-methyladenosine-3'-phosphate
  modified_base 19: mod_base = OTHER; note = 2'-O-methyladenosine-3'-phosphate
  modified_base 20: mod_base = OTHER; note = 2'-O-methyladenosine-3'-phosphate
  modified_base 21: mod_base = OTHER; note = 2'-O-methylguanosine-3'-phosphorothioate
  modified_base 22: mod_base = OTHER; note = 2'-O-methylcytidine-3'-phosphorothioate
  modified_base 23: mod_base = OTHER; note = 2'-O-methyladenosine
aatatcttcaagttacaaaagca

SEQ ID NO: 2443 - RNA, 21 nt, synthetic construct
  source 1..21: mol_type = other RNA
  modified_base 1: mod_base = OTHER; note = 2'-O-methylguanosine-3'-phosphorothioate
  modified_base 2: mod_base = OTHER; note = 2'-O-methyladenosine-3'-phosphorothioate
  modified_base 3: mod_base = OTHER; note = 2'-O-methyladenosine-3'-phosphate
  modified_base 4: mod_base = OTHER; note = 2'-O-methylguanosine-3'-phosphate
  modified_base 5: mod_base = OTHER; note = 2'-O-methyladenosine-3'-phosphate
  modified_base 6: mod_base = OTHER; note = 2'-O-methyluridine-3'-phosphate
  modified_base 7: mod_base = OTHER; note = 2'-fluoroadenosine-3'-phosphate
  modified_base 8: mod_base = OTHER; note = 2'-O-methyluridine-3'-phosphate
  modified_base 9: mod_base = OTHER; note = 2'-fluorouridine-3'-phosphate
  modified_base 10: mod_base = OTHER; note = 2'-fluorouridine-3'-phosphate
  modified_base 11: mod_base = OTHER; note = 2'-fluoroadenosine-3'-phosphate
  modified_base 12: mod_base = OTHER; note = 2'-O-methyluridine-3'-phosphate
  modified_base 13: mod_base = OTHER; note = 2'-O-methyluridine-3'-phosphate
  modified_base 14: mod_base = OTHER; note = 2'-O-methylcytidine-3'-phosphate
  modified_base 15: mod_base = OTHER; note = 2'-O-methyluridine-3'-phosphate
  modified_base 16: mod_base = OTHER; note = 2'-O-methylguanosine-3'-phosphate
  modified_base 17: mod_base = OTHER; note = 2'-fluoroguanosine-3'-phosphate
  modified_base 18: mod_base = OTHER; note = 2'-O-methylguanosine-3'-phosphate
  modified_base 19: mod_base = OTHER; note = 2'-O-methyluridine-3'-phosphate
  modified_base 20: mod_base = OTHER; note = 2'-O-methyluridine-3'-phosphate
  modified_base 21: mod_base = OTHER; note = 2'-O-methyluridine
gaagatatttattctgggttt

SEQ ID NO: 2444 - RNA, 23 nt, synthetic construct
  source 1..23: mol_type = other RNA
  modified_base 1: mod_base = OTHER; note 5'-(E)-vinylphosphonate-2'-O-methyladenosine-3'-phosphoroth ioate
  modified_base 2: mod_base = OTHER; note = 2'-fluoroadenosine-3'-phosphorothioate
  modified_base 3: mod_base = OTHER; note = 2'-O-methyladenosine-3'-phosphate
  modified_base 4: mod_base = OTHER; note = 2'-fluorocytidine-3'-phosphate
  modified_base 5: mod_base = OTHER; note = 2'-fluorocytidine-3'-phosphate
  modified_base 6: mod_base = OTHER; note = 2'-fluorocytidine-3'-phosphate
  modified_base 7: mod_base = OTHER; note = 2'-O-methyladenosine-3'-phosphate
  modified_base 8: mod_base = OTHER; note = 2'-O-methylguanosine-3'-phosphate
  modified_base 9: mod_base = OTHER; note = 2'-O-methyladenosine-3'-phosphate
  modified_base 10: mod_base = OTHER; note = 2'-O-methyladenosine-3'-phosphate
  modified_base 11: mod_base = OTHER; note = 2'-O-methyluridine-3'-phosphate
  modified_base 12: mod_base = OTHER; note = 2'-O-methyladenosine-3'-phosphate
  modified_base 13: mod_base = OTHER; note = 2'-O-methyladenosine-3'-phosphate
  modified_base 14: mod_base = OTHER; note = 2'-fluoroadenosine-3'-phosphate
  modified_base 15: mod_base = OTHER; note = 2'-O-methyluridine-3'-phosphate
  modified_base 16: mod_base = OTHER; note = 2'-fluoroadenosine-3'-phosphate
  modified_base 17: mod_base = OTHER; note = 2'-O-methyluridine-3'-phosphate
  modified_base 18: mod_base = OTHER; note = 2'-O-methylcytidine-3'-phosphate
  modified_base 19: mod_base = OTHER; note = 2'-O-methyluridine-3'-phosphate
  modified_base 20: mod_base = OTHER; note = 2'-O-methyluridine-3'-phosphate
  modified_base 21: mod_base = OTHER; note = 2'-O-methylcytidine-3'-phosphorothioate
  modified_base 22: mod_base = OTHER; note = 2'-O-methyladenosine-3'-phosphorothioate
  modified_base 23: mod_base = OTHER; note = 2'-O-methyladenosine
aaacccagaataaatatcttcaa

SEQ ID NO: 2445 - RNA, 21 nt, synthetic construct
  source 1..21: mol_type = other RNA
  modified_base 1: mod_base = OTHER; note = 2'-O-methylguanosine-3'-phosphorothioate
  modified_base 2: mod_base = OTHER; note = 2'-O-methyladenosine-3'-phosphorothioate
  modified_base 3: mod_base = OTHER; note = 2'-O-methyladenosine-3'-phosphate
  modified_base 4: mod_base = OTHER; note = 2'-O-methylguanosine-3'-phosphate
  modified_base 5: mod_base = OTHER; note = 2'-O-methyladenosine-3'-phosphate
  modified_base 6: mod_base = OTHER; note = 2'-O-methyluridine-3'-phosphate
  modified_base 7: mod_base = OTHER; note = 2'-fluoroadenosine-3'-phosphate
  modified_base 8: mod_base = OTHER; note = 2'-O-methyluridine-3'-phosphate
  modified_base 9: mod_base = OTHER; note = 2'-fluorouridine-3'-phosphate
  modified_base 10: mod_base = OTHER; note = 2'-O-methyluridine-3'-phosphate
  modified_base 11: mod_base = OTHER; note = 2'-fluoroadenosine-3'-phosphate
  modified_base 12: mod_base = OTHER; note = 2'-O-methyluridine-3'-phosphate
  modified_base 13: mod_base = OTHER; note = 2'-O-methyluridine-3'-phosphate
  modified_base 14: mod_base = OTHER; note = 2'-O-methylcytidine-3'-phosphate
  modified_base 15: mod_base = OTHER; note = 2'-O-methyluridine-3'-phosphate
  modified_base 16: mod_base = OTHER; note = 2'-O-methylguanosine-3'-phosphate
  modified_base 17: mod_base = OTHER; note = 2'-fluoroguanosine-3'-phosphate
  modified_base 18: mod_base = OTHER; note = 2'-O-methylguanosine-3'-phosphate
  modified_base 19: mod_base = OTHER; note = 2'-O-methyluridine-3'-phosphate
  modified_base 20: mod_base = OTHER; note = 2'-O-methyluridine-3'-phosphate
  modified_base 21: mod_base = OTHER; note = 2'-O-methyluridine
gaagatatttattctgggttt

SEQ ID NO: 2446 - RNA, 23 nt, synthetic construct
  source 1..23: mol_type = other RNA
  modified_base 1: mod_base = OTHER; note = 2'-O-methyladenosine-3'-phosphorothioate
  modified_base 2: mod_base = OTHER; note = 2'-fluoroadenosine-3'-phosphorothioate
  modified_base 3: mod_base = OTHER; note = 2'-O-methyladenosine-3'-phosphate
  modified_base 4: mod_base = OTHER; note = 2'-fluorocytidine-3'-phosphate
  modified_base 5: mod_base = OTHER; note = 2'-fluorocytidine-3'-phosphate
  modified_base 6: mod_base = OTHER; note = 2'-fluorocytidine-3'-phosphate
  modified_base 7: mod_base = OTHER; note = 2'-O-methyladenosine-3'-phosphate
  modified_base 8: mod_base = OTHER; note = 2'-O-methylguanosine-3'-phosphate
  modified_base 9: mod_base = OTHER; note = 2'-O-methyladenosine-3'-phosphate
  modified_base 10: mod_base = OTHER; note = 2'-O-methyladenosine-3'-phosphate
  modified_base 11: mod_base = OTHER; note = 2'-O-methyluridine-3'-phosphate
  modified_base 12: mod_base = OTHER; note = 2'-O-methyladenosine-3'-phosphate
  modified_base 13: mod_base = OTHER; note = 2'-O-methyladenosine-3'-phosphate
  modified_base 14: mod_base = OTHER; note = 2'-fluoroadenosine-3'-phosphate
  modified_base 15: mod_base = OTHER; note = 2'-O-methyluridine-3'-phosphate
  modified_base 16: mod_base = OTHER; note = 2'-fluoroadenosine-3'-phosphate
  modified_base 17: mod_base = OTHER; note = 2'-O-methyluridine-3'-phosphate
  modified_base 18: mod_base = OTHER; note = 2'-O-methylcytidine-3'-phosphate
  modified_base 19: mod_base = OTHER; note = 2'-O-methyluridine-3'-phosphate
  modified_base 20: mod_base = OTHER; note = 2'-O-methyluridine-3'-phosphate
  modified_base 21: mod_base = OTHER; note = 2'-O-methylcytidine-3'-phosphorothioate
  modified_base 22: mod_base = OTHER; note = 2'-O-methyladenosine-3'-phosphorothioate
  modified_base 23: mod_base = OTHER; note = 2'-O-methyladenosine
aaacccagaataaatatcttcaa

SEQ ID NO: 2447 - RNA, 21 nt, synthetic construct
  source 1..21: mol_type = other RNA
  modified_base 1: mod_base = OTHER; note = 2'-O-methylguanosine-3'-phosphorothioate
  modified_base 2: mod_base = OTHER; note = 2'-O-methyladenosine-3'-phosphorothioate
  modified_base 3: mod_base = OTHER; note = 2'-O-methyladenosine-3'-phosphate
  modified_base 4: mod_base = OTHER; note = 2'-O-methylguanosine-3'-phosphate
  modified_base 5: mod_base = OTHER; note = 2'-O-methyladenosine-3'-phosphate
  modified_base 6: mod_base = OTHER; note = 2'-O-methyluridine-3'-phosphate
  modified_base 7: mod_base = OTHER; note = 2'-fluoroadenosine-3'-phosphate
  modified_base 8: mod_base = OTHER; note = 2'-O-methyluridine-3'-phosphate
  modified_base 9: mod_base = OTHER; note = 2'-fluorouridine-3'-phosphate
  modified_base 10: mod_base = OTHER; note = 2'-O-methyluridine-3'-phosphate
  modified_base 11: mod_base = OTHER; note = 2'-fluoroadenosine-3'-phosphate
  modified_base 12: mod_base = OTHER; note = 2'-O-methyluridine-3'-phosphate
  modified_base 13: mod_base = OTHER; note = 2'-O-methyluridine-3'-phosphate
  modified_base 14: mod_base = OTHER; note = 2'-O-methylcytidine-3'-phosphate
  modified_base 15: mod_base = OTHER; note = 2'-O-methyluridine-3'-phosphate
  modified_base 16: mod_base = OTHER; note = 2'-O-methylguanosine-3'-phosphate
  modified_base 17: mod_base = OTHER; note = 2'-fluoroguanosine-3'-phosphate
  modified_base 18: mod_base = OTHER; note = 2'-O-methylguanosine-3'-phosphate
  modified_base 19: mod_base = OTHER; note = 2'-O-methyluridine-3'-phosphate
  modified_base 20: mod_base = OTHER; note = 2'-O-methyluridine-3'-phosphate
  modified_base 21: mod_base = OTHER; note = 2'-O-methyluridine
gaagatatttattctgggttt

SEQ ID NO: 2448 - RNA, 23 nt, synthetic construct
  source 1..23: mol_type = other RNA
  modified_base 1: mod_base = OTHER; note 5'-(E)-vinylphosphonate-2'-O-methyladenosine-3'-phosphoroth ioate
  modified_base 2: mod_base = OTHER; note = 2'-fluoroadenosine-3'-phosphorothioate
  modified_base 3: mod_base = OTHER; note = 2'-O-methyladenosine-3'-phosphate
  modified_base 4: mod_base = OTHER; note = 2'-fluorocytidine-3'-phosphate
  modified_base 5: mod_base = OTHER; note = 2'-fluorocytidine-3'-phosphate
  modified_base 6: mod_base = OTHER; note = 2'-fluorocytidine-3'-phosphate
  modified_base 7: mod_base = OTHER; note = 2'-O-methyladenosine-3'-phosphate
  modified_base 8: mod_base = OTHER; note = 2'-O-methylguanosine-3'-phosphate
  modified_base 9: mod_base = OTHER; note = 2'-O-methyladenosine-3'-phosphate
  modified_base 10: mod_base = OTHER; note = 2'-O-methyladenosine-3'-phosphate
  modified_base 11: mod_base = OTHER; note = 2'-O-methyluridine-3'-phosphate
  modified_base 12: mod_base = OTHER; note = 2'-O-methyladenosine-3'-phosphate
  modified_base 13: mod_base = OTHER; note = 2'-O-methyladenosine-3'-phosphate
  modified_base 14: mod_base = OTHER; note = 2'-fluoroadenosine-3'-phosphate
  modified_base 15: mod_base = OTHER; note = 2'-O-methyluridine-3'-phosphate
  modified_base 16: mod_base = OTHER; note = 2'-fluoroadenosine-3'-phosphate
  modified_base 17: mod_base = OTHER; note = 2'-O-methyluridine-3'-phosphate
  modified_base 18: mod_base = OTHER; note = 2'-O-methylcytidine-3'-phosphate
  modified_base 19: mod_base = OTHER; note = 2'-O-methyluridine-3'-phosphate
  modified_base 20: mod_base = OTHER; note = 2'-O-methyluridine-3'-phosphate
  modified_base 21: mod_base = OTHER; note = 2'-O-methylcytidine-3'-phosphorothioate
  modified_base 22: mod_base = OTHER; note = 2'-O-methyladenosine-3'-phosphorothioate
  modified_base 23: mod_base = OTHER; note = 2'-O-methyladenosine
aaacccagaataaatatcttcaa

SEQ ID NO: 2449 - RNA, 21 nt, synthetic construct
  source 1..21: mol_type = other RNA
  modified_base 1: mod_base = OTHER; note = 2'-O-methylguanosine-3'-phosphorothioate
  modified_base 2: mod_base = OTHER; note = 2'-O-methyluridine-3'-phosphorothioate
  modified_base 3: mod_base = OTHER; note = 2'-O-methyluridine-3'-phosphate
  modified_base 4: mod_base = OTHER; note = 2'-O-methyluridine-3'-phosphate
  modified_base 5: mod_base = OTHER; note = 2'-O-methyluridine-3'-phosphate
  modified_base 6: mod_base = OTHER; note = 2'-O-methylguanosine-3'-phosphate
  modified_base 7: mod_base = OTHER; note = 2'-fluorouridine-3'-phosphate
  modified_base 8: mod_base = OTHER; note = 2'-O-methyladenosine-3'-phosphate
  modified_base 9: mod_base = OTHER; note = 2'-fluoroguanosine-3'-phosphate
  modified_base 10: mod_base = OTHER; note = 2'-fluorocytidine-3'-phosphate
  modified_base 11: mod_base = OTHER; note = 2'-fluoroadenosine-3'-phosphate
  modified_base 12: mod_base = OTHER; note = 2'-O-methyluridine-3'-phosphate
  modified_base 13: mod_base = OTHER; note = 2'-O-methyluridine-3'-phosphate
  modified_base 14: mod_base = OTHER; note = 2'-O-methyluridine-3'-phosphate
  modified_base 15: mod_base = OTHER; note = 2'-O-methyluridine-3'-phosphate
  modified_base 16: mod_base = OTHER; note = 2'-O-methyluridine-3'-phosphate
  modified_base 17: mod_base = OTHER; note = 2'-fluoroadenosine-3'-phosphate
  modified_base 18: mod_base = OTHER; note = 2'-O-methyluridine-3'-phosphate
  modified_base 19: mod_base = OTHER; note = 2'-O-methyluridine-3'-phosphate
  modified_base 20: mod_base = OTHER; note = 2'-O-methyladenosine-3'-phosphate
  modified_base 21: mod_base = OTHER; note = 2'-O-methyladenosine
gttttgtagcatttttattaa

SEQ ID NO: 2450 - RNA, 23 nt, synthetic construct
  source 1..23: mol_type = other RNA
  modified_base 1: mod_base = OTHER; note = 2'-O-methyluridine-3'-phosphorothioate
  modified_base 2: mod_base = OTHER; note = 2'-fluorouridine-3'-phosphorothioate
  modified_base 3: mod_base = OTHER; note = 2'-fluoroadenosine-3'-phosphate
  modified_base 4: mod_base = OTHER; note = 2'-fluoroadenosine-3'-phosphate
  modified_base 5: mod_base = OTHER; note = 2'-O-methyluridine-3'-phosphate
  modified_base 6: mod_base = OTHER; note = 2'-fluoroadenosine-3'-phosphate
  modified_base 7: mod_base = OTHER; note = 2'-O-methyladenosine-3'-phosphate
  modified_base 8: mod_base = OTHER; note = 2'-O-methyladenosine-3'-phosphate
  modified_base 9: mod_base = OTHER; note = 2'-O-methyladenosine-3'-phosphate
  modified_base 10: mod_base = OTHER; note = 2'-O-methyladenosine-3'-phosphate
  modified_base 11: mod_base = OTHER; note = 2'-O-methyluridine-3'-phosphate
  modified_base 12: mod_base = OTHER; note = 2'-O-methylguanosine-3'-phosphate
  modified_base 13: mod_base = OTHER; note = 2'-O-methylcytidine-3'-phosphate
  modified_base 14: mod_base = OTHER; note = 2'-fluorouridine-3'-phosphate
  modified_base 15: mod_base = OTHER; note = 2'-O-methyladenosine-3'-phosphate
  modified_base 16: mod_base = OTHER; note = 2'-fluorocytidine-3'-phosphate
  modified_base 17: mod_base = OTHER; note = 2'-O-methyladenosine-3'-phosphate
  modified_base 18: mod_base = OTHER; note = 2'-O-methyladenosine-3'-phosphate
  modified_base 19: mod_base = OTHER; note = 2'-O-methyladenosine-3'-phosphate
  modified_base 20: mod_base = OTHER; note = 2'-O-methyladenosine-3'-phosphate
  modified_base 21: mod_base = OTHER; note = 2'-O-methylcytidine-3'-phosphorothioate
  modified_base 22: mod_base = OTHER; note = 2'-O-methylcytidine-3'-phosphorothioate
  modified_base 23: mod_base = OTHER; note = 2'-O-methylcytidine
ttaataaaaatgctacaaaaccc

SEQ ID NO: 2451 - RNA, 21 nt, synthetic construct
  source 1..21: mol_type = other RNA
  modified_base 1: mod_base = OTHER; note = 2'-O-methylguanosine-3'-phosphorothioate
  modified_base 2: mod_base = OTHER; note = 2'-O-methyluridine-3'-phosphorothioate
  modified_base 3: mod_base = OTHER; note = 2'-O-methyluridine-3'-phosphate
  modified_base 4: mod_base = OTHER; note = 2'-O-methyluridine-3'-phosphate
  modified_base 5: mod_base = OTHER; note = 2'-O-methyluridine-3'-phosphate
  modified_base 6: mod_base = OTHER; note = 2'-O-methylguanosine-3'-phosphate
  modified_base 7: mod_base = OTHER; note = 2'-fluorouridine-3'-phosphate
  modified_base 8: mod_base = OTHER; note = 2'-O-methyladenosine-3'-phosphate
  modified_base 9: mod_base = OTHER; note = 2'-fluoroguanosine-3'-phosphate
  modified_base 10: mod_base = OTHER; note = 2'-fluorocytidine-3'-phosphate
  modified_base 11: mod_base = OTHER; note = 2'-fluoroadenosine-3'-phosphate
  modified_base 12: mod_base = OTHER; note = 2'-O-methyluridine-3'-phosphate
  modified_base 13: mod_base = OTHER; note = 2'-O-methyluridine-3'-phosphate
  modified_base 14: mod_base = OTHER; note = 2'-O-methyluridine-3'-phosphate
  modified_base 15: mod_base = OTHER; note = 2'-O-methyluridine-3'-phosphate
  modified_base 16: mod_base = OTHER; note = 2'-O-methyluridine-3'-phosphate
  modified_base 17: mod_base = OTHER; note = 2'-fluoroadenosine-3'-phosphate
  modified_base 18: mod_base = OTHER; note = 2'-O-methyluridine-3'-phosphate
  modified_base 19: mod_base = OTHER; note = 2'-O-methyluridine-3'-phosphate
  modified_base 20: mod_base = OTHER; note = 2'-O-methyladenosine-3'-phosphate
  modified_base 21: mod_base = OTHER; note = 2'-O-methyladenosine
gttttgtagcatttttattaa

SEQ ID NO: 2452 - RNA, 23 nt, synthetic construct
  source 1..23: mol_type = other RNA
  modified_base 1: mod_base = OTHER; note 5'-(E)-vinylphosphonate-2'-O-methyluridine-3'-phosphorothio ate
  modified_base 2: mod_base = OTHER; note = 2'-fluorouridine-3'-phosphorothioate
  modified_base 3: mod_base = OTHER; note = 2'-O-methyladenosine-3'-phosphate
  modified_base 4: mod_base = OTHER; note = 2'-fluoroadenosine-3'-phosphate
  modified_base 5: mod_base = OTHER; note = 2'-fluorouridine-3'-phosphate
  modified_base 6: mod_base = OTHER; note = 2'-fluoroadenosine-3'-phosphate
  modified_base 7: mod_base = OTHER; note = 2'-O-methyladenosine-3'-phosphate
  modified_base 8: mod_base = OTHER; note = 2'-O-methyladenosine-3'-phosphate
  modified_base 9: mod_base = OTHER; note = 2'-O-methyladenosine-3'-phosphate
  modified_base 10: mod_base = OTHER; note = 2'-O-methyladenosine-3'-phosphate
  modified_base 11: mod_base = OTHER; note = 2'-O-methyluridine-3'-phosphate
  modified_base 12: mod_base = OTHER; note = 2'-O-methylguanosine-3'-phosphate
  modified_base 13: mod_base = OTHER; note = 2'-O-methylcytidine-3'-phosphate
  modified_base 14: mod_base = OTHER; note = 2'-fluorouridine-3'-phosphate
  modified_base 15: mod_base = OTHER; note = 2'-O-methyladenosine-3'-phosphate
  modified_base 16: mod_base = OTHER; note = 2'-fluorocytidine-3'-phosphate
  modified_base 17: mod_base = OTHER; note = 2'-O-methyladenosine-3'-phosphate
  modified_base 18: mod_base = OTHER; note = 2'-O-methyladenosine-3'-phosphate
  modified_base 19: mod_base = OTHER; note = 2'-O-methyladenosine-3'-phosphate
  modified_base 20: mod_base = OTHER; note = 2'-O-methyladenosine-3'-phosphate
  modified_base 21: mod_base = OTHER; note = 2'-O-methylcytidine-3'-phosphorothioate
  modified_base 22: mod_base = OTHER; note = 2'-O-methylcytidine-3'-phosphorothioate
  modified_base 23: mod_base = OTHER; note = 2'-O-methylcytidine
ttaataaaaatgctacaaaaccc

SEQ ID NO: 2453 - RNA, 21 nt, synthetic construct
  source 1..21: mol_type = other RNA
  modified_base 1: mod_base = OTHER; note = 2'-O-methylguanosine-3'-phosphorothioate
  modified_base 2: mod_base = OTHER; note = 2'-O-methyluridine-3'-phosphorothioate
  modified_base 3: mod_base = OTHER; note = 2'-O-methyluridine-3'-phosphate
  modified_base 4: mod_base = OTHER; note = 2'-O-methyluridine-3'-phosphate
  modified_base 5: mod_base = OTHER; note = 2'-O-methyluridine-3'-phosphate
  modified_base 6: mod_base = OTHER; note = 2'-O-methylguanosine-3'-phosphate
  modified_base 7: mod_base = OTHER; note = 2'-fluorouridine-3'-phosphate
  modified_base 8: mod_base = OTHER; note = 2'-O-methyladenosine-3'-phosphate
  modified_base 9: mod_base = OTHER; note = 2'-fluoroguanosine-3'-phosphate
  modified_base 10: mod_base = OTHER; note = 2'-fluorocytidine-3'-phosphate
  modified_base 11: mod_base = OTHER; note = 2'-fluoroadenosine-3'-phosphate
  modified_base 12: mod_base = OTHER; note = 2'-O-methyluridine-3'-phosphate
  modified_base 13: mod_base = OTHER; note = 2'-O-methyluridine-3'-phosphate
  modified_base 14: mod_base = OTHER; note = 2'-O-methyluridine-3'-phosphate
  modified_base 15: mod_base = OTHER; note = 2'-O-methyluridine-3'-phosphate
  modified_base 16: mod_base = OTHER; note = 2'-O-methyluridine-3'-phosphate
  modified_base 17: mod_base = OTHER; note = 2'-fluoroadenosine-3'-phosphate
  modified_base 18: mod_base = OTHER; note = 2'-O-methyluridine-3'-phosphate
  modified_base 19: mod_base = OTHER; note = 2'-O-methyluridine-3'-phosphate
  modified_base 20: mod_base = OTHER; note = 2'-O-methyladenosine-3'-phosphate
  modified_base 21: mod_base = OTHER; note = 2'-O-methyladenosine
gttttgtagcatttttattaa

SEQ ID NO: 2454 - RNA, 23 nt, synthetic construct
  source 1..23: mol_type = other RNA
  modified_base 1: mod_base = OTHER; note 5'-(E)-vinylphosphonate-2'-O-methyluridine-3'-phosphorothio ate
  modified_base 2: mod_base = OTHER; note = 2'-fluorouridine-3'-phosphorothioate
  modified_base 3: mod_base = OTHER; note = 2'-O-methyladenosine-3'-phosphate
  modified_base 4: mod_base = OTHER; note = 2'-fluoroadenosine-3'-phosphate
  modified_base 5: mod_base = OTHER; note = 2'-fluorouridine-3'-phosphate
  modified_base 6: mod_base = OTHER; note = 2'-fluoroadenosine-3'-phosphate
  modified_base 7: mod_base = OTHER; note = adenine glycol nucleic acid-2'-phosphate
  modified_base 8: mod_base = OTHER; note = 2'-O-methyladenosine-3'-phosphate
  modified_base 9: mod_base = OTHER; note = 2'-O-methyladenosine-3'-phosphate
  modified_base 10: mod_base = OTHER; note = 2'-O-methyladenosine-3'-phosphate
  modified_base 11: mod_base = OTHER; note = 2'-O-methyluridine-3'-phosphate
  modified_base 12: mod_base = OTHER; note = 2'-O-methylguanosine-3'-phosphate
  modified_base 13: mod_base = OTHER; note = 2'-O-methylcytidine-3'-phosphate
  modified_base 14: mod_base = OTHER; note = 2'-fluorouridine-3'-phosphate
  modified_base 15: mod_base = OTHER; note = 2'-O-methyladenosine-3'-phosphate
  modified_base 16: mod_base = OTHER; note = 2'-fluorocytidine-3'-phosphate
  modified_base 17: mod_base = OTHER; note = 2'-O-methyladenosine-3'-phosphate
  modified_base 18: mod_base = OTHER; note = 2'-O-methyladenosine-3'-phosphate
  modified_base 19: mod_base = OTHER; note = 2'-O-methyladenosine-3'-phosphate
  modified_base 20: mod_base = OTHER; note = 2'-O-methyladenosine-3'-phosphate
  modified_base 21: mod_base = OTHER; note = 2'-O-methylcytidine-3'-phosphorothioate
  modified_base 22: mod_base = OTHER; note = 2'-O-methylcytidine-3'-phosphorothioate
  modified_base 23: mod_base = OTHER; note = 2'-O-methylcytidine
ttaataaaaatgctacaaaaccc

SEQ ID NO: 2455 - RNA, 20 nt, synthetic construct
  source 1..20: mol_type = other RNA
  modified_base 1: mod_base = OTHER; note = 2'-O-methyladenosine-3'-phosphate
  modified_base 2: mod_base = OTHER; note = 2'-O-methylguanosine-3'-phosphate
  modified_base 3: mod_base = OTHER; note = 2'-O-methyladenosine-3'-phosphate
  modified_base 4: mod_base = OTHER; note = 2'-O-methylcytidine-3'-phosphate
  modified_base 5: mod_base = OTHER; note = 2'-O-methylcytidine-3'-phosphate
  modified_base 6: mod_base = OTHER; note = 2'-O-methyluridine-3'-phosphate
  modified_base 7: mod_base = OTHER; note = 2'-fluoroguanosine-3'-phosphate
  modified_base 8: mod_base = OTHER; note = 2'-O-methyluridine-3'-phosphate
  modified_base 9: mod_base = OTHER; note = 2'-fluorouridine-3'-phosphate
  modified_base 10: mod_base = OTHER; note = 2'-fluorouridine-3'-phosphate
  modified_base 11: mod_base = OTHER; note = 2'-fluorouridine-3'-phosphate
  modified_base 12: mod_base = OTHER; note = 2'-O-methylguanosine-3'-phosphate
  modified_base 13: mod_base = OTHER; note = 2'-O-methylcytidine-3'-phosphate
  modified_base 14: mod_base = OTHER; note = 2'-O-methyluridine-3'-phosphate
  modified_base 15: mod_base = OTHER; note = 2'-O-methyluridine-3'-phosphate
  modified_base 16: mod_base = OTHER; note = 2'-O-methyluridine-3'-phosphate
  modified_base 17: mod_base = OTHER; note = 2'-O-methyluridine-3'-phosphate
  modified_base 18: mod_base = OTHER; note = 2'-O-methylguanosine-3'-phosphorothioate
  modified_base 19: mod_base = OTHER; note = 2'-O-methyluridine-3'-phosphorothioate
  modified_base 20: mod_base = OTHER; note = Abasic nucleotide
agacctgttttgcttttgtn

SEQ ID NO: 2456 - RNA, 21 nt, synthetic construct
  source 1..21: mol_type = other RNA
  modified_base 1: mod_base = OTHER; note = 2'-O-methyladenosine-3'-phosphorothioate
  modified_base 2: mod_base = OTHER; note = 2'-fluorocytidine-3'-phosphorothioate
  modified_base 3: mod_base = OTHER; note = 2'-O-methyladenosine-3'-phosphate
  modified_base 4: mod_base = OTHER; note = 2'-O-methyladenosine-3'-phosphate
  modified_base 5: mod_base = OTHER; note = 2'-O-methyladenosine-3'-phosphate
  modified_base 6: mod_base = OTHER; note = 2'-fluoroadenosine-3'-phosphate
  modified_base 7: mod_base = OTHER; note = 2'-O-methylguanosine-3'-phosphate
  modified_base 8: mod_base = OTHER; note = 2'-O-methylcytidine-3'-phosphate
  modified_base 9: mod_base = OTHER; note = 2'-O-methyladenosine-3'-phosphate
  modified_base 10: mod_base = OTHER; note = 2'-O-methyladenosine-3'-phosphate
  modified_base 11: mod_base = OTHER; note = 2'-O-methyladenosine-3'-phosphate
  modified_base 12: mod_base = OTHER; note = 2'-O-methyladenosine-3'-phosphate
  modified_base 13: mod_base = OTHER; note = 2'-O-methylcytidine-3'-phosphate
  modified_base 14: mod_base = OTHER; note = 2'-fluoroadenosine-3'-phosphate
  modified_base 15: mod_base = OTHER; note = 2'-O-methylguanosine-3'-phosphate
  modified_base 16: mod_base = OTHER; note = 2'-fluoroguanosine-3'-phosphate
  modified_base 17: mod_base = OTHER; note = 2'-O-methyluridine-3'-phosphate
  modified_base 18: mod_base = OTHER; note = 2'-O-methylcytidine-3'-phosphate
  modified_base 19: mod_base = OTHER; note = 2'-O-methyluridine-3'-phosphorothioate
  modified_base 20: mod_base = OTHER; note = 2'-O-methyladenosine-3'-phosphorothioate
  modified_base 21: mod_base = OTHER; note = 2'-O-methylguanosine
acaaaagcaaaacaggtctag

SEQ ID NO: 2457 - RNA, 20 nt, synthetic construct
  source 1..20: mol_type = other RNA
  modified_base 1: mod_base = OTHER; note = Abasic nucleotide-3'-phosphorothioate
  modified_base 2: mod_base = OTHER; note = 2'-O-methyladenosine-3'-phosphorothioate
  modified_base 3: mod_base = OTHER; note = 2'-O-methylguanosine-3'-phosphate
  modified_base 4: mod_base = OTHER; note = 2'-O-methyladenosine-3'-phosphate
  modified_base 5: mod_base = OTHER; note = 2'-O-methylcytidine-3'-phosphate
  modified_base 6: mod_base = OTHER; note = 2'-O-methylcytidine-3'-phosphate
  modified_base 7: mod_base = OTHER; note = 2'-O-methyluridine-3'-phosphate
  modified_base 8: mod_base = OTHER; note = 2'-fluoroguanosine-3'-phosphate
  modified_base 9: mod_base = OTHER; note = 2'-O-methyluridine-3'-phosphate
  modified_base 10: mod_base = OTHER; note = 2'-fluorouridine-3'-phosphate
  modified_base 11: mod_base = OTHER; note = 2'-fluorouridine-3'-phosphate
  modified_base 12: mod_base = OTHER; note = 2'-fluorouridine-3'-phosphate
  modified_base 13: mod_base = OTHER; note = 2'-O-methylguanosine-3'-phosphate
  modified_base 14: mod_base = OTHER; note = 2'-O-methylcytidine-3'-phosphate
  modified_base 15: mod_base = OTHER; note = 2'-O-methyluridine-3'-phosphate
  modified_base 16: mod_base = OTHER; note = 2'-O-methyluridine-3'-phosphate
  modified_base 17: mod_base = OTHER; note = 2'-O-methyluridine-3'-phosphate
  modified_base 18: mod_base = OTHER; note = 2'-O-methyluridine-3'-phosphate
  modified_base 19: mod_base = OTHER; note = 2'-O-methylguanosine-3'-phosphate
  modified_base 20: mod_base = OTHER; note = 2'-O-methyluridine
nagacctgttttgcttttgt

SEQ ID NO: 2458 - RNA, 21 nt, synthetic construct
  source 1..21: mol_type = other RNA
  modified_base 1: mod_base = OTHER; note = 2'-O-methyladenosine-3'-phosphorothioate
  modified_base 2: mod_base = OTHER; note = 2'-fluorocytidine-3'-phosphorothioate
  modified_base 3: mod_base = OTHER; note = 2'-O-methyladenosine-3'-phosphate
  modified_base 4: mod_base = OTHER; note = 2'-O-methyladenosine-3'-phosphate
  modified_base 5: mod_base = OTHER; note = 2'-O-methyladenosine-3'-phosphate
  modified_base 6: mod_base = OTHER; note = 2'-fluoroadenosine-3'-phosphate
  modified_base 7: mod_base = OTHER; note = 2'-O-methylguanosine-3'-phosphate
  modified_base 8: mod_base = OTHER; note = 2'-O-methylcytidine-3'-phosphate
  modified_base 9: mod_base = OTHER; note = 2'-O-methyladenosine-3'-phosphate
  modified_base 10: mod_base = OTHER; note = 2'-O-methyladenosine-3'-phosphate
  modified_base 11: mod_base = OTHER; note = 2'-O-methyladenosine-3'-phosphate
  modified_base 12: mod_base = OTHER; note = 2'-O-methyladenosine-3'-phosphate
  modified_base 13: mod_base = OTHER; note = 2'-O-methylcytidine-3'-phosphate
  modified_base 14: mod_base = OTHER; note = 2'-fluoroadenosine-3'-phosphate
  modified_base 15: mod_base = OTHER; note = 2'-O-methylguanosine-3'-phosphate
  modified_base 16: mod_base = OTHER; note = 2'-fluoroguanosine-3'-phosphate
  modified_base 17: mod_base = OTHER; note = 2'-O-methyluridine-3'-phosphate
  modified_base 18: mod_base = OTHER; note = 2'-O-methylcytidine-3'-phosphate
  modified_base 19: mod_base = OTHER; note = 2'-O-methyluridine-3'-phosphorothioate
  modified_base 20: mod_base = OTHER; note = 2'-O-methyladenosine-3'-phosphorothioate
  modified_base 21: mod_base = OTHER; note = 2'-O-methylguanosine
acaaaagcaaaacaggtctag

SEQ ID NO: 2459 - DNA, 20 bp, synthetic construct
  source 1..20: mol_type = other DNA
  misc_feature 1: note = RNA
  misc_feature 2..3: note = DNA
  misc_feature 4: note = RNA
  misc_feature 5..15: note = DNA
  misc_feature 16: note = RNA
  misc_feature 17: note = DNA
  misc_feature 18..19: note = RNA
  misc_feature 20: note = DNA
tgctccgttggtgcttgttc

SEQ ID NO: 2460 - DNA, 20 bp, synthetic construct
  source 1..20: mol_type = other DNA
  modified_base 1: mod_base = OTHER; note 2'-O-methoxyethyl(MOE)-5-methyluridine-3'-phosphorothioate
  modified_base 2: mod_base = OTHER; note = 2'-O-methoxyethyl(MOE)-guanosine-3'-phosphate
  modified_base 3: mod_base = OTHER; note = 2'-O-methoxyethyl(MOE)-5-methylcytidine-3'-phosphate
  modified_base 4: mod_base = OTHER; note = 2'-O-methoxyethyl(MOE)-5-methyluridine-3'-phosphate
  modified_base 5: mod_base = OTHER; note = 2'-O-methoxyethyl(MOE)-5-methylcytidine-3'-phosphate
  modified_base 6: mod_base = OTHER; note = 5-methylcytidine-3'-phosphorothioate
  modified_base 7: mod_base = OTHER; note = Guanosine-3'-phosphorothioate
  modified_base 8: mod_base = OTHER; note = Thymine-3'-phosphorothioate
  modified_base 9: mod_base = OTHER; note = Thymine-3'-phosphorothioate
  modified_base 10: mod_base = OTHER; note = Guanosine-3'-phosphorothioate
  modified_base 11: mod_base = OTHER; note = Guanosine-3'-phosphorothioate
  modified_base 12: mod_base = OTHER; note = Thymine-3'-phosphorothioate
  modified_base 13: mod_base = OTHER; note = Guanosine-3'-phosphorothioate
  modified_base 14: mod_base = OTHER; note = 5-methylcytidine-3'-phosphorothioate
  modified_base 15: mod_base = OTHER; note = Thymine-3'-phosphorothioate
  modified_base 16: mod_base = OTHER; note = 2'-O-methoxyethyl(MOE)-5-methyluridine-3'-phosphate
  modified_base 17: mod_base = OTHER; note = 2'-O-methoxyethyl(MOE)-guanosine-3'-phosphate
  modified_base 18: mod_base = OTHER; note 2'-O-methoxyethyl(MOE)-5-methyluridine-3'-phosphorothioate
  modified_base 19: mod_base = OTHER; note 2'-O-methoxyethyl(MOE)-5-methyluridine-3'-phosphorothioate
  modified_base 20: mod_base = OTHER; note = 2'-O-methoxyethyl(MOE)-5-methylcytidine
  misc_feature 1..5: note = RNA
  misc_feature 6..15: note = DNA
  misc_feature 16..20: note = RNA
tgctccgttggtgcttgttc

SEQ ID NO: 2461 - DNA, 20 bp, synthetic construct
  source 1..20: mol_type = other DNA
  modified_base 1: mod_base = OTHER; note 2'-O-methoxyethyl(MOE)-5-methyluridine-3'-phosphorothioate
  modified_base 2: mod_base = OTHER; note = 2'-O-methoxyethyl(MOE)-guanosine-3'-phosphate
  modified_base 3: mod_base = OTHER; note = 2'-O-methoxyethyl(MOE)-5-methylcytidine-3'-phosphate
  modified_base 4: mod_base = OTHER; note = 2'-O-methoxyethyl(MOE)-5-methyluridine-3'-phosphate
  modified_base 5: mod_base = OTHER; note = 2'-O-methoxyethyl(MOE)-5-methylcytidine-3'-phosphate
  modified_base 6: mod_base = OTHER; note = 5-methylcytidine-3'-phosphorothioate
  modified_base 7: mod_base = OTHER; note = Guanosine-3'-phosphorothioate
  modified_base 8: mod_base = OTHER; note = Thymine-3'-phosphorothioate
  modified_base 9: mod_base = OTHER; note = Thymine-3'-phosphorothioate
  modified_base 10: mod_base = OTHER; note = Guanosine-3'-phosphorothioate
  modified_base 11: mod_base = OTHER; note = Guanosine-3'-phosphorothioate
  modified_base 12: mod_base = OTHER; note = Thymine-3'-phosphorothioate
  modified_base 13: mod_base = OTHER; note = Guanosine-3'-phosphorothioate
  modified_base 14: mod_base = OTHER; note = 5-methylcytidine-3'-phosphorothioate
  modified_base 15: mod_base = OTHER; note = Thymine-3'-phosphorothioate
  modified_base 16: mod_base = OTHER; note = 2'-O-methoxyethyl(MOE)-5-methyluridine-3'-phosphate
  modified_base 17: mod_base = OTHER; note = 2'-O-methoxyethyl(MOE)-guanosine-3'-phosphate
  modified_base 18: mod_base = OTHER; note 2'-O-methoxyethyl(MOE)-5-methyluridine-3'-phosphorothioate
  modified_base 19: mod_base = OTHER; note 2'-O-methoxyethyl(MOE)-5-methyluridine-3'-phosphorothioate
  modified_base 20: mod_base = OTHER; note = 2'-O-methoxyethyl(MOE)-5-methylcytidine
  misc_feature 1..5: note = RNA
  misc_feature 6..15: note = DNA
  misc_feature 16..20: note = RNA
tgctccgttggtgcttgttc

SEQ ID NO: 2462 - RNA, 21 nt, synthetic construct
  source 1..21: mol_type = other RNA
gagagttatcgaggcacataa

SEQ ID NO: 2463 - RNA, 21 nt, synthetic construct
  source 1..21: mol_type = other RNA
ttatgtgcctcgataactctc

SEQ ID NO: 2464 - RNA, 21 nt, synthetic construct
  source 1..21: mol_type = other RNA
  modified_base 1: mod_base = OTHER; note = 2'-O-methylguanosine-3'-phosphate
  modified_base 2: mod_base = OTHER; note = 2'-O-methyladenosine-3'-phosphate
  modified_base 3: mod_base = OTHER; note = 2'-O-methylguanosine-3'-phosphate
  modified_base 4: mod_base = OTHER; note = 2'-O-methyladenosine-3'-phosphate
  modified_base 5: mod_base = OTHER; note = 2'-O-methylguanosine-3'-phosphate
  modified_base 6: mod_base = OTHER; note = 2'-O-methyluridine-3'-phosphate
  modified_base 7: mod_base = OTHER; note = 2'-O-methyluridine-3'-phosphate
  modified_base 8: mod_base = OTHER; note = 2'-O-methyladenosine-3'-phosphate
  modified_base 9: mod_base = OTHER; note = 2'-fluorouridine-3'-phosphate
  modified_base 10: mod_base = OTHER; note = 2'-O-methylcytidine-3'-phosphate
  modified_base 11: mod_base = OTHER; note = 2'-fluoroguanosine-3'-phosphate
  modified_base 12: mod_base = OTHER; note = 2'-O-methyladenosine-3'-phosphate
  modified_base 13: mod_base = OTHER; note = 2'-fluoroguanosine-3'-phosphate
  modified_base 14: mod_base = OTHER; note = 2'-O-methylguanosine-3'-phosphate
  modified_base 15: mod_base = OTHER; note = 2'-O-methylcytidine-3'-phosphate
  modified_base 16: mod_base = OTHER; note = 2'-O-methyladenosine-3'-phosphate
  modified_base 17: mod_base = OTHER; note = 2'-O-methylcytidine-3'-phosphate
  modified_base 18: mod_base = OTHER; note = 2'-O-methyladenosine-3'-phosphate
  modified_base 19: mod_base = OTHER; note = 2'-O-methyluridine-3'-phosphate
  modified_base 20: mod_base = OTHER; note = 2'-O-methyladenosine-3'-phosphate
  modified_base 21: mod_base = OTHER; note = 2'-O-methyladenosine
  misc_feature 1: note = Nucleotide linked to an inverted abasic nucleotide via a 5'-5'-phosphorothioate linkage
  misc_feature 21: note = Nucleotide linked to an inverted abasic nucleotide via a 3'-3'-phosphorothioate linkage
gagagttatcgaggcacataa

SEQ ID NO: 2465 - RNA, 21 nt, synthetic construct
  source 1..21: mol_type = other RNA
  modified_base 1: mod_base = OTHER; note = 2'-O-methyluridine-3'-phosphorothioate
  modified_base 2: mod_base = OTHER; note = 2'-fluorouridine-3'-phosphorothioate
  modified_base 3: mod_base = OTHER; note = 2'-O-methyladenosine-3'-phosphate
  modified_base 4: mod_base = OTHER; note = 2'-O-methyluridine-3'-phosphate
  modified_base 5: mod_base = OTHER; note = 2'-O-methylguanosine-3'-phosphate
  modified_base 6: mod_base = OTHER; note = 2'-O-methyluridine-3'-phosphate
  modified_base 7: mod_base = OTHER; note = 2'-fluoroguanosine-3'-phosphate
  modified_base 8: mod_base = OTHER; note = 2'-O-methylcytidine-3'-phosphate
  modified_base 9: mod_base = OTHER; note = 2'-O-methylcytidine-3'-phosphate
  modified_base 10: mod_base = OTHER; note = 2'-O-methyluridine-3'-phosphate
  modified_base 11: mod_base = OTHER; note = 2'-O-methylcytidine-3'-phosphate
  modified_base 12: mod_base = OTHER; note = 2'-fluoroguanosine-3'-phosphate
  modified_base 13: mod_base = OTHER; note = 2'-O-methyladenosine-3'-phosphate
  modified_base 14: mod_base = OTHER; note = 2'-fluorouridine-3'-phosphate
  modified_base 15: mod_base = OTHER; note = 2'-O-methyladenosine-3'-phosphate
  modified_base 16: mod_base = OTHER; note = 2'-fluoroadenosine-3'-phosphate
  modified_base 17: mod_base = OTHER; note = 2'-O-methylcytidine-3'-phosphate
  modified_base 18: mod_base = OTHER; note = 2'-O-methyluridine-3'-phosphate
  modified_base 19: mod_base = OTHER; note = 2'-O-methylcytidine-3'-phosphorothioate
  modified_base 20: mod_base = OTHER; note = 2'-O-methyluridine-3'-phosphorothioate
  modified_base 21: mod_base = OTHER; note = 2'-O-methylcytidine
ttatgtgcctcgataactctc

SEQ ID NO: 2466 - RNA, 21 nt, synthetic construct
  source 1..21: mol_type = other RNA
  modified_base 1: mod_base = OTHER; note = 2'-O-methylguanosine-3'-phosphate
  modified_base 2: mod_base = OTHER; note = 2'-O-methyladenosine-3'-phosphate
  modified_base 3: mod_base = OTHER; note = 2'-O-methylguanosine-3'-phosphate
  modified_base 4: mod_base = OTHER; note = 2'-O-methyladenosine-3'-phosphate
  modified_base 5: mod_base = OTHER; note = 2'-O-methylguanosine-3'-phosphate
  modified_base 6: mod_base = OTHER; note = 2'-O-methyluridine-3'-phosphate
  modified_base 7: mod_base = OTHER; note = 2'-O-methyluridine-3'-phosphate
  modified_base 8: mod_base = OTHER; note = 2'-O-methyladenosine-3'-phosphate
  modified_base 9: mod_base = OTHER; note = 2'-fluorouridine-3'-phosphate
  modified_base 10: mod_base = OTHER; note = 2'-O-methylcytidine-3'-phosphate
  modified_base 11: mod_base = OTHER; note = 2'-fluoroguanosine-3'-phosphate
  modified_base 12: mod_base = OTHER; note = 2'-O-methyladenosine-3'-phosphate
  modified_base 13: mod_base = OTHER; note = 2'-fluoroguanosine-3'-phosphate
  modified_base 14: mod_base = OTHER; note = 2'-O-methylguanosine-3'-phosphate
  modified_base 15: mod_base = OTHER; note = 2'-O-methylcytidine-3'-phosphate
  modified_base 16: mod_base = OTHER; note = 2'-O-methyladenosine-3'-phosphate
  modified_base 17: mod_base = OTHER; note = 2'-O-methylcytidine-3'-phosphate
  modified_base 18: mod_base = OTHER; note = 2'-O-methyladenosine-3'-phosphate
  modified_base 19: mod_base = OTHER; note = 2'-O-methyluridine-3'-phosphate
  modified_base 20: mod_base = OTHER; note = 2'-O-methyladenosine-3'-phosphorothioate
  modified_base 21: mod_base = OTHER; note = 2'-O-methyladenosine
gagagttatcgaggcacataa

SEQ ID NO: 2467 - RNA, 21 nt, synthetic construct
  source 1..21: mol_type = other RNA
  modified_base 1: mod_base = OTHER; note = 2'-fluorouridine-3'-phosphorothioate
  modified_base 2: mod_base = OTHER; note = 2'-fluorouridine-3'-phosphorothioate
  modified_base 3: mod_base = OTHER; note = 2'-O-methyladenosine-3'-phosphate
  modified_base 4: mod_base = OTHER; note = 2'-O-methyluridine-3'-phosphate
  modified_base 5: mod_base = OTHER; note = 2'-O-methylguanosine-3'-phosphate
  modified_base 6: mod_base = OTHER; note = 2'-O-methyluridine-3'-phosphate
  modified_base 7: mod_base = OTHER; note = 2'-fluoroguanosine-3'-phosphate
  modified_base 8: mod_base = OTHER; note = 2'-O-methylcytidine-3'-phosphate
  modified_base 9: mod_base = OTHER; note = 2'-O-methylcytidine-3'-phosphate
  modified_base 10: mod_base = OTHER; note = 2'-O-methyluridine-3'-phosphate
  modified_base 11: mod_base = OTHER; note = 2'-O-methylcytidine-3'-phosphate
  modified_base 12: mod_base = OTHER; note = 2'-fluoroguanosine-3'-phosphate
  modified_base 13: mod_base = OTHER; note = 2'-O-methyladenosine-3'-phosphate
  modified_base 14: mod_base = OTHER; note = 2'-fluorouridine-3'-phosphate
  modified_base 15: mod_base = OTHER; note = 2'-O-methyladenosine-3'-phosphate
  modified_base 16: mod_base = OTHER; note = 2'-fluoroadenosine-3'-phosphate
  modified_base 17: mod_base = OTHER; note = 2'-O-methylcytidine-3'-phosphate
  modified_base 18: mod_base = OTHER; note = 2'-O-methyluridine-3'-phosphate
  modified_base 19: mod_base = OTHER; note = 2'-O-methylcytidine-3'-phosphorothioate
  modified_base 20: mod_base = OTHER; note = 2'-O-methyluridine-3'-phosphorothioate
  modified_base 21: mod_base = OTHER; note = 2'-O-methylcytidine
ttatgtgcctcgataactctc

SEQ ID NO: 2468 - RNA, 21 nt, synthetic construct
  source 1..21: mol_type = other RNA
  modified_base 1: mod_base = OTHER; note = 2'-O-methylguanosine-3'-phosphate
  modified_base 2: mod_base = OTHER; note = 2'-O-methyladenosine-3'-phosphate
  modified_base 3: mod_base = OTHER; note = 2'-O-methylguanosine-3'-phosphate
  modified_base 4: mod_base = OTHER; note = 2'-O-methyladenosine-3'-phosphate
  modified_base 5: mod_base = OTHER; note = 2'-O-methylguanosine-3'-phosphate
  modified_base 6: mod_base = OTHER; note = 2'-O-methyluridine-3'-phosphate
  modified_base 7: mod_base = OTHER; note = 2'-O-methyluridine-3'-phosphate
  modified_base 8: mod_base = OTHER; note = 2'-O-methyladenosine-3'-phosphate
  modified_base 9: mod_base = OTHER; note = 2'-fluorouridine-3'-phosphate
  modified_base 10: mod_base = OTHER; note = 2'-O-methylcytidine-3'-phosphate
  modified_base 11: mod_base = OTHER; note = 2'-fluoroguanosine-3'-phosphate
  modified_base 12: mod_base = OTHER; note = 2'-O-methyladenosine-3'-phosphate
  modified_base 13: mod_base = OTHER; note = 2'-fluoroguanosine-3'-phosphate
  modified_base 14: mod_base = OTHER; note = 2'-O-methylguanosine-3'-phosphate
  modified_base 15: mod_base = OTHER; note = 2'-O-methylcytidine-3'-phosphate
  modified_base 16: mod_base = OTHER; note = 2'-O-methyladenosine-3'-phosphate
  modified_base 17: mod_base = OTHER; note = 2'-O-methylcytidine-3'-phosphate
  modified_base 18: mod_base = OTHER; note = 2'-O-methyladenosine-3'-phosphate
  modified_base 19: mod_base = OTHER; note = 2'-O-methyluridine-3'-phosphate
  modified_base 20: mod_base = OTHER; note = 2'-O-methyladenosine-3'-phosphorothioate
  modified_base 21: mod_base = OTHER; note = 2'-O-methyladenosine
gagagttatcgaggcacataa

SEQ ID NO: 2469 - RNA, 21 nt, synthetic construct
  source 1..21: mol_type = other RNA
  modified_base 1: mod_base = OTHER; note = 2'-O-methyluridine-3'-phosphorothioate
  modified_base 2: mod_base = OTHER; note = 2'-fluorouridine-3'-phosphorothioate
  modified_base 3: mod_base = OTHER; note = 2'-O-methyladenosine-3'-phosphate
  modified_base 4: mod_base = OTHER; note = 2'-O-methyluridine-3'-phosphate
  modified_base 5: mod_base = OTHER; note = 2'-O-methylguanosine-3'-phosphate
  modified_base 6: mod_base = OTHER; note = 2'-O-methyluridine-3'-phosphate
  modified_base 7: mod_base = OTHER; note = 2'-fluoroguanosine-3'-phosphate
  modified_base 8: mod_base = OTHER; note = 2'-O-methylcytidine-3'-phosphate
  modified_base 9: mod_base = OTHER; note = 2'-O-methylcytidine-3'-phosphate
  modified_base 10: mod_base = OTHER; note = 2'-O-methyluridine-3'-phosphate
  modified_base 11: mod_base = OTHER; note = 2'-O-methylcytidine-3'-phosphate
  modified_base 12: mod_base = OTHER; note = 2'-fluoroguanosine-3'-phosphate
  modified_base 13: mod_base = OTHER; note = 2'-O-methyladenosine-3'-phosphate
  modified_base 14: mod_base = OTHER; note = 2'-fluorouridine-3'-phosphate
  modified_base 15: mod_base = OTHER; note = 2'-O-methyladenosine-3'-phosphate
  modified_base 16: mod_base = OTHER; note = 2'-fluoroadenosine-3'-phosphate
  modified_base 17: mod_base = OTHER; note = 2'-O-methylcytidine-3'-phosphate
  modified_base 18: mod_base = OTHER; note = 2'-O-methyluridine-3'-phosphate
  modified_base 19: mod_base = OTHER; note = 2'-O-methylcytidine-3'-phosphorothioate
  modified_base 20: mod_base = OTHER; note = 2'-O-methyluridine-3'-phosphorothioate
  modified_base 21: mod_base = OTHER; note = 2'-O-methylcytidine
ttatgtgcctcgataactctc

SEQ ID NO: 2470 - RNA, 21 nt, synthetic construct
  source 1..21: mol_type = other RNA
  modified_base 1: mod_base = OTHER; note = 2'-O-methylguanosine-3'-phosphate
  modified_base 2: mod_base = OTHER; note = 2'-O-methyladenosine-3'-phosphate
  modified_base 3: mod_base = OTHER; note = 2'-O-methylguanosine-3'-phosphate
  modified_base 4: mod_base = OTHER; note = 2'-O-methyladenosine-3'-phosphate
  modified_base 5: mod_base = OTHER; note = 2'-O-methylguanosine-3'-phosphate
  modified_base 6: mod_base = OTHER; note = 2'-O-methyluridine-3'-phosphate
  modified_base 7: mod_base = OTHER; note = 2'-O-methyluridine-3'-phosphate
  modified_base 8: mod_base = OTHER; note = 2'-O-methyladenosine-3'-phosphate
  modified_base 9: mod_base = OTHER; note = 2'-fluorouridine-3'-phosphate
  modified_base 10: mod_base = OTHER; note = 2'-O-methylcytidine-3'-phosphate
  modified_base 11: mod_base = OTHER; note = 2'-fluoroguanosine-3'-phosphate
  modified_base 12: mod_base = OTHER; note = 2'-O-methyladenosine-3'-phosphate
  modified_base 13: mod_base = OTHER; note = 2'-fluoroguanosine-3'-phosphate
  modified_base 14: mod_base = OTHER; note = 2'-O-methylguanosine-3'-phosphate
  modified_base 15: mod_base = OTHER; note = 2'-O-methylcytidine-3'-phosphate
  modified_base 16: mod_base = OTHER; note = 2'-O-methyladenosine-3'-phosphate
  modified_base 17: mod_base = OTHER; note = 2'-O-methylcytidine-3'-phosphate
  modified_base 18: mod_base = OTHER; note = 2'-O-methyladenosine-3'-phosphate
  modified_base 19: mod_base = OTHER; note = 2'-O-methyluridine-3'-phosphate
  modified_base 20: mod_base = OTHER; note = 2'-O-methyladenosine-3'-phosphate
  modified_base 21: mod_base = OTHER; note = 2'-O-methyladenosine
  misc_feature 1: note = Nucleotide linked to an inverted abasic nucleotide via a 5'-5'-phosphorothioate linkage
  misc_feature 21: note = Nucleotide linked to an inverted abasic nucleotide via a 3'-3'-phosphorothioate linkage
gagagttatcgaggcacataa

SEQ ID NO: 2471 - RNA, 21 nt, synthetic construct
  source 1..21: mol_type = other RNA
  modified_base 1: mod_base = OTHER; note = 2'-O-methylguanosine-3'-phosphate
  modified_base 2: mod_base = OTHER; note = 2'-O-methyladenosine-3'-phosphate
  modified_base 3: mod_base = OTHER; note = 2'-O-methylguanosine-3'-phosphate
  modified_base 4: mod_base = OTHER; note = 2'-O-methyladenosine-3'-phosphate
  modified_base 5: mod_base = OTHER; note = 2'-O-methylguanosine-3'-phosphate
  modified_base 6: mod_base = OTHER; note = 2'-O-methyluridine-3'-phosphate
  modified_base 7: mod_base = OTHER; note = 2'-O-methyluridine-3'-phosphate
  modified_base 8: mod_base = OTHER; note = 2'-O-methyladenosine-3'-phosphate
  modified_base 9: mod_base = OTHER; note = 2'-fluorouridine-3'-phosphate
  modified_base 10: mod_base = OTHER; note = 2'-O-methylcytidine-3'-phosphate
  modified_base 11: mod_base = OTHER; note = 2'-fluoroguanosine-3'-phosphate
  modified_base 12: mod_base = OTHER; note = 2'-O-methyladenosine-3'-phosphate
  modified_base 13: mod_base = OTHER; note = 2'-fluoroguanosine-3'-phosphate
  modified_base 14: mod_base = OTHER; note = 2'-O-methylguanosine-3'-phosphate
  modified_base 15: mod_base = OTHER; note = 2'-O-methylcytidine-3'-phosphate
  modified_base 16: mod_base = OTHER; note = 2'-O-methyladenosine-3'-phosphate
  modified_base 17: mod_base = OTHER; note = 2'-O-methylcytidine-3'-phosphate
  modified_base 18: mod_base = OTHER; note = 2'-O-methyladenosine-3'-phosphate
  modified_base 19: mod_base = OTHER; note = 2'-O-methyluridine-3'-phosphate
  modified_base 20: mod_base = OTHER; note = 2'-O-methyladenosine-3'-phosphorothioate
  modified_base 21: mod_base = OTHER; note = 2'-O-methyladenosine
gagagttatcgaggcacataa

SEQ ID NO: 2472 - RNA, 21 nt, synthetic construct
  source 1..21: mol_type = other RNA
  modified_base 1: mod_base = OTHER; note = 2'-O-methylguanosine-3'-phosphate
  modified_base 2: mod_base = OTHER; note = 2'-O-methyladenosine-3'-phosphate
  modified_base 3: mod_base = OTHER; note = 2'-O-methylguanosine-3'-phosphate
  modified_base 4: mod_base = OTHER; note = 2'-O-methyladenosine-3'-phosphate
  modified_base 5: mod_base = OTHER; note = 2'-O-methylguanosine-3'-phosphate
  modified_base 6: mod_base = OTHER; note = 2'-O-methyluridine-3'-phosphate
  modified_base 7: mod_base = OTHER; note = 2'-O-methyluridine-3'-phosphate
  modified_base 8: mod_base = OTHER; note = 2'-O-methyladenosine-3'-phosphate
  modified_base 9: mod_base = OTHER; note = 2'-fluorouridine-3'-phosphate
  modified_base 10: mod_base = OTHER; note = 2'-O-methylcytidine-3'-phosphate
  modified_base 11: mod_base = OTHER; note = 2'-fluoroguanosine-3'-phosphate
  modified_base 12: mod_base = OTHER; note = 2'-O-methyladenosine-3'-phosphate
  modified_base 13: mod_base = OTHER; note = 2'-fluoroguanosine-3'-phosphate
  modified_base 14: mod_base = OTHER; note = 2'-O-methylguanosine-3'-phosphate
  modified_base 15: mod_base = OTHER; note = 2'-O-methylcytidine-3'-phosphate
  modified_base 16: mod_base = OTHER; note = 2'-O-methyladenosine-3'-phosphate
  modified_base 17: mod_base = OTHER; note = 2'-O-methylcytidine-3'-phosphate
  modified_base 18: mod_base = OTHER; note = 2'-O-methyladenosine-3'-phosphate
  modified_base 19: mod_base = OTHER; note = 2'-O-methyluridine-3'-phosphate
  modified_base 20: mod_base = OTHER; note = 2'-O-methyladenosine-3'-phosphate
  modified_base 21: mod_base = OTHER; note = 2'-O-methyladenosine
  misc_feature 1: note = Nucleotide linked to an inverted abasic nucleotide via a 5'-5'-phosphorothioate linkage
  misc_feature 21: note = Nucleotide linked to an inverted abasic nucleotide via a 3'-3'-phosphorothioate linkage
gagagttatcgaggcacataa

SEQ ID NO: 2473 - RNA, 21 nt, synthetic construct
  source 1..21: mol_type = other RNA
  modified_base 1: mod_base = OTHER; note = 2'-O-methyluridine-3'-phosphorothioate
  modified_base 2: mod_base = OTHER; note = 2'-fluorouridine-3'-phosphorothioate
  modified_base 3: mod_base = OTHER; note = 2'-O-methyladenosine-3'-phosphate
  modified_base 4: mod_base = OTHER; note = 2'-O-methyluridine-3'-phosphate
  modified_base 5: mod_base = OTHER; note = 2'-O-methylguanosine-3'-phosphate
  modified_base 6: mod_base = OTHER; note = 2'-O-methyluridine-3'-phosphate
  modified_base 7: mod_base = OTHER; note = 2'-fluoroguanosine-3'-phosphate
  modified_base 8: mod_base = OTHER; note = 2'-O-methylcytidine-3'-phosphate
  modified_base 9: mod_base = OTHER; note = 2'-O-methylcytidine-3'-phosphate
  modified_base 10: mod_base = OTHER; note = 2'-O-methyluridine-3'-phosphate
  modified_base 11: mod_base = OTHER; note = 2'-O-methylcytidine-3'-phosphate
  modified_base 12: mod_base = OTHER; note = 2'-fluoroguanosine-3'-phosphate
  modified_base 13: mod_base = OTHER; note = 2'-O-methyladenosine-3'-phosphate
  modified_base 14: mod_base = OTHER; note = 2'-fluorouridine-3'-phosphate
  modified_base 15: mod_base = OTHER; note = 2'-O-methyladenosine-3'-phosphate
  modified_base 16: mod_base = OTHER; note = 2'-fluoroadenosine-3'-phosphate
  modified_base 17: mod_base = OTHER; note = 2'-O-methylcytidine-3'-phosphate
  modified_base 18: mod_base = OTHER; note = 2'-O-methyluridine-3'-phosphate
  modified_base 19: mod_base = OTHER; note = 2'-O-methylcytidine-3'-phosphorothioate
  modified_base 20: mod_base = OTHER; note = 2'-O-methyluridine-3'-phosphorothioate
  modified_base 21: mod_base = OTHER; note = 2'-O-methylcytidine
ttatgtgcctcgataactctc

SEQ ID NO: 2474 - RNA, 21 nt, synthetic construct
  source 1..21: mol_type = other RNA
  modified_base 1: mod_base = OTHER; note = 2'-fluorouridine-3'-phosphorothioate
  modified_base 2: mod_base = OTHER; note = 2'-fluorouridine-3'-phosphorothioate
  modified_base 3: mod_base = OTHER; note = 2'-O-methyladenosine-3'-phosphate
  modified_base 4: mod_base = OTHER; note = 2'-O-methyluridine-3'-phosphate
  modified_base 5: mod_base = OTHER; note = 2'-O-methylguanosine-3'-phosphate
  modified_base 6: mod_base = OTHER; note = 2'-O-methyluridine-3'-phosphate
  modified_base 7: mod_base = OTHER; note = 2'-fluoroguanosine-3'-phosphate
  modified_base 8: mod_base = OTHER; note = 2'-O-methylcytidine-3'-phosphate
  modified_base 9: mod_base = OTHER; note = 2'-O-methylcytidine-3'-phosphate
  modified_base 10: mod_base = OTHER; note = 2'-O-methyluridine-3'-phosphate
  modified_base 11: mod_base = OTHER; note = 2'-O-methylcytidine-3'-phosphate
  modified_base 12: mod_base = OTHER; note = 2'-fluoroguanosine-3'-phosphate
  modified_base 13: mod_base = OTHER; note = 2'-O-methyladenosine-3'-phosphate
  modified_base 14: mod_base = OTHER; note = 2'-fluorouridine-3'-phosphate
  modified_base 15: mod_base = OTHER; note = 2'-O-methyladenosine-3'-phosphate
  modified_base 16: mod_base = OTHER; note = 2'-fluoroadenosine-3'-phosphate
  modified_base 17: mod_base = OTHER; note = 2'-O-methylcytidine-3'-phosphate
  modified_base 18: mod_base = OTHER; note = 2'-O-methyluridine-3'-phosphate
  modified_base 19: mod_base = OTHER; note = 2'-O-methylcytidine-3'-phosphorothioate
  modified_base 20: mod_base = OTHER; note = 2'-O-methyluridine-3'-phosphorothioate
  modified_base 21: mod_base = OTHER; note = 2'-O-methylcytidine
ttatgtgcctcgataactctc

SEQ ID NO: 2475 - RNA, 21 nt, synthetic construct
  source 1..21: mol_type = other RNA
  modified_base 1: mod_base = OTHER; note = 2'-O-methyluridine-3'-phosphorothioate
  modified_base 2: mod_base = OTHER; note = 2'-fluorouridine-3'-phosphorothioate
  modified_base 3: mod_base = OTHER; note = 2'-O-methyladenosine-3'-phosphate
  modified_base 4: mod_base = OTHER; note = 2'-O-methyluridine-3'-phosphate
  modified_base 5: mod_base = OTHER; note = 2'-O-methylguanosine-3'-phosphate
  modified_base 6: mod_base = OTHER; note = 2'-O-methyluridine-3'-phosphate
  modified_base 7: mod_base = OTHER; note = 2'-fluoroguanosine-3'-phosphate
  modified_base 8: mod_base = OTHER; note = 2'-O-methylcytidine-3'-phosphate
  modified_base 9: mod_base = OTHER; note = 2'-O-methylcytidine-3'-phosphate
  modified_base 10: mod_base = OTHER; note = 2'-O-methyluridine-3'-phosphate
  modified_base 11: mod_base = OTHER; note = 2'-O-methylcytidine-3'-phosphate
  modified_base 12: mod_base = OTHER; note = 2'-fluoroguanosine-3'-phosphate
  modified_base 13: mod_base = OTHER; note = 2'-O-methyladenosine-3'-phosphate
  modified_base 14: mod_base = OTHER; note = 2'-fluorouridine-3'-phosphate
  modified_base 15: mod_base = OTHER; note = 2'-O-methyladenosine-3'-phosphate
  modified_base 16: mod_base = OTHER; note = 2'-fluoroadenosine-3'-phosphate
  modified_base 17: mod_base = OTHER; note = 2'-O-methylcytidine-3'-phosphate
  modified_base 18: mod_base = OTHER; note = 2'-O-methyluridine-3'-phosphate
  modified_base 19: mod_base = OTHER; note = 2'-O-methylcytidine-3'-phosphorothioate
  modified_base 20: mod_base = OTHER; note = 2'-O-methyluridine-3'-phosphorothioate
  modified_base 21: mod_base = OTHER; note = 2'-O-methylcytidine
ttatgtgcctcgataactctc

SEQ ID NO: 2476 - RNA, 20 nt, synthetic construct
  source 1..20: mol_type = other RNA
  modified_base 1: mod_base = OTHER; note = 2'-O-methylcytidine-3'-phosphorothioate
  modified_base 2: mod_base = OTHER; note = 2'-O-methyladenosine-3'-phosphate
  modified_base 3: mod_base = OTHER; note = 2'-O-methylguanosine-3'-phosphate
  modified_base 4: mod_base = OTHER; note = 2'-O-methylcytidine-3'-phosphate
  modified_base 5: mod_base = OTHER; note = 2'-O-methylcytidine-3'-phosphate
  modified_base 6: mod_base = OTHER; note = 2'-O-methylcytidine-3'-phosphate
  modified_base 7: mod_base = OTHER; note = 2'-O-methylcytidine-3'-phosphate
  modified_base 8: mod_base = OTHER; note = 2'-O-methyluridine-3'-phosphate
  modified_base 9: mod_base = OTHER; note = 2'-fluorouridine-3'-phosphate
  modified_base 10: mod_base = OTHER; note = 2'-fluoroadenosine-3'-phosphate
  modified_base 11: mod_base = OTHER; note = 2'-fluorouridine-3'-phosphate
  modified_base 12: mod_base = OTHER; note = 2'-O-methyluridine-3'-phosphate
  modified_base 13: mod_base = OTHER; note = 2'-O-methylguanosine-3'-phosphate
  modified_base 14: mod_base = OTHER; note = 2'-O-methyluridine-3'-phosphate
  modified_base 15: mod_base = OTHER; note = 2'-O-methyluridine-3'-phosphate
  modified_base 16: mod_base = OTHER; note = 2'-O-methyladenosine-3'-phosphate
  modified_base 17: mod_base = OTHER; note = 2'-O-methyluridine-3'-phosphate
  modified_base 18: mod_base = OTHER; note = 2'-O-methyladenosine-3'-phosphate
  modified_base 19: mod_base = OTHER; note = 2'-O-methylcytidine-3'-phosphate
  modified_base 20: mod_base = OTHER; note = 2'-O-methylguanosine
  misc_feature 20: note = Nucleotide linked to an inverted deoxyadenosine via a 3'-3'-phosphorothioate linkage
cagccccttattgttatacg

SEQ ID NO: 2477 - RNA, 18 nt, synthetic construct
  source 1..18: mol_type = other RNA
  modified_base 1: mod_base = OTHER; note = 2'-O-methylguanosine-3'-phosphate
  modified_base 2: mod_base = OTHER; note = 2'-O-methylcytidine-3'-phosphate
  modified_base 3: mod_base = OTHER; note = 2'-O-methylcytidine-3'-phosphate
  modified_base 4: mod_base = OTHER; note = 2'-O-methylcytidine-3'-phosphate
  modified_base 5: mod_base = OTHER; note = 2'-O-methylcytidine-3'-phosphate
  modified_base 6: mod_base = OTHER; note = 2'-O-methyluridine-3'-phosphate
  modified_base 7: mod_base = OTHER; note = 2'-fluorouridine-3'-phosphate
  modified_base 8: mod_base = OTHER; note = 2'-fluoroadenosine-3'-phosphate
  modified_base 9: mod_base = OTHER; note = 2'-fluorouridine-3'-phosphate
  modified_base 10: mod_base = OTHER; note = 2'-O-methyluridine-3'-phosphate
  modified_base 11: mod_base = OTHER; note = 2'-O-methylguanosine-3'-phosphate
  modified_base 12: mod_base = OTHER; note = 2'-O-methyluridine-3'-phosphate
  modified_base 13: mod_base = OTHER; note = 2'-O-methyluridine-3'-phosphate
  modified_base 14: mod_base = OTHER; note = 2'-O-methyladenosine-3'-phosphate
  modified_base 15: mod_base = OTHER; note = 2'-O-methyluridine-3'-phosphate
  modified_base 16: mod_base = OTHER; note = 2'-O-methyladenosine-3'-phosphate
  modified_base 17: mod_base = OTHER; note = 2'-O-methylcytidine-3'-phosphate
  modified_base 18: mod_base = OTHER; note = 2'-O-methylguanosine
gccccttattgttatacg

SEQ ID NO: 2478 - RNA, 21 nt, synthetic construct
  source 1..21: mol_type = other RNA
  modified_base 1: mod_base = OTHER; note = 2'-O-methyluridine-3'-phosphorothioate
  modified_base 2: mod_base = OTHER; note = 2'-fluorocytidine-3'-phosphorothioate
  modified_base 3: mod_base = OTHER; note = 2'-O-methylguanosine-3'-phosphate
  modified_base 4: mod_base = OTHER; note = 2'-fluorouridine-3'-phosphate
  modified_base 5: mod_base = OTHER; note = 2'-O-methyladenosine-3'-phosphate
  modified_base 6: mod_base = OTHER; note = 2'-fluorouridine-3'-phosphate
  modified_base 7: mod_base = OTHER; note = 2'-O-methyladenosine-3'-phosphate
  modified_base 8: mod_base = OTHER; note = 2'-O-methyladenosine-3'-phosphate
  modified_base 9: mod_base = OTHER; note = 2'-O-methylcytidine-3'-phosphate
  modified_base 10: mod_base = OTHER; note = 2'-O-methyladenosine-3'-phosphate
  modified_base 11: mod_base = OTHER; note = 2'-O-methyladenosine-3'-phosphate
  modified_base 12: mod_base = OTHER; note = 2'-fluorouridine-3'-phosphate
  modified_base 13: mod_base = OTHER; note = 2'-O-methyladenosine-3'-phosphate
  modified_base 14: mod_base = OTHER; note = 2'-fluoroadenosine-3'-phosphate
  modified_base 15: mod_base = OTHER; note = 2'-O-methylguanosine-3'-phosphate
  modified_base 16: mod_base = OTHER; note = 2'-fluoroguanosine-3'-phosphate
  modified_base 17: mod_base = OTHER; note = 2'-O-methylguanosine-3'-phosphate
  modified_base 18: mod_base = OTHER; note = 2'-fluoroguanosine-3'-phosphate
  modified_base 19: mod_base = OTHER; note = 2'-O-methylcytidine-3'-phosphorothioate
  modified_base 20: mod_base = OTHER; note = 2'-fluorouridine-3'-phosphorothioate
  modified_base 21: mod_base = OTHER; note = 2'-O-methylguanosine
tcgtataacaataaggggctg

SEQ ID NO: 2479 - RNA, 18 nt, synthetic construct
  source 1..18: mol_type = other RNA
  modified_base 1: mod_base = OTHER; note = 2'-fluorocytidine-3'-phosphorothioate
  modified_base 2: mod_base = OTHER; note = 2'-O-methylguanosine-3'-phosphate
  modified_base 3: mod_base = OTHER; note = 2'-fluorouridine-3'-phosphate
  modified_base 4: mod_base = OTHER; note = 2'-O-methyladenosine-3'-phosphate
  modified_base 5: mod_base = OTHER; note = 2'-fluorouridine-3'-phosphate
  modified_base 6: mod_base = OTHER; note = 2'-O-methyladenosine-3'-phosphate
  modified_base 7: mod_base = OTHER; note = 2'-O-methyladenosine-3'-phosphate
  modified_base 8: mod_base = OTHER; note = 2'-O-methylcytidine-3'-phosphate
  modified_base 9: mod_base = OTHER; note = 2'-O-methyladenosine-3'-phosphate
  modified_base 10: mod_base = OTHER; note = 2'-O-methyladenosine-3'-phosphate
  modified_base 11: mod_base = OTHER; note = 2'-fluorouridine-3'-phosphate
  modified_base 12: mod_base = OTHER; note = 2'-O-methyladenosine-3'-phosphate
  modified_base 13: mod_base = OTHER; note = 2'-fluoroadenosine-3'-phosphate
  modified_base 14: mod_base = OTHER; note = 2'-O-methylguanosine-3'-phosphate
  modified_base 15: mod_base = OTHER; note = 2'-fluoroguanosine-3'-phosphate
  modified_base 16: mod_base = OTHER; note = 2'-O-methylguanosine-3'-phosphate
  modified_base 17: mod_base = OTHER; note = 2'-fluoroguanosine-3'-phosphate
  modified_base 18: mod_base = OTHER; note = 2'-O-methylcytidine
cgtataacaataaggggc

SEQ ID NO: 2480 - RNA, 19 nt, synthetic construct
  source 1..19: mol_type = other RNA
  modified_base 1: mod_base = OTHER; note = 2'-O-methylcytidine-3'-phosphorothioate
  modified_base 2: mod_base = OTHER; note = 2'-O-methylguanosine-3'-phosphate
  modified_base 3: mod_base = OTHER; note = 2'-O-methylguanosine-3'-phosphate
  modified_base 4: mod_base = OTHER; note = 2'-O-methyluridine-3'-phosphate
  modified_base 5: mod_base = OTHER; note = 2'-O-methyladenosine-3'-phosphate
  modified_base 6: mod_base = OTHER; note = 2'-O-methyladenosine-3'-phosphate
  modified_base 7: mod_base = OTHER; note = 2'-fluorouridine-3'-phosphate
  modified_base 8: mod_base = OTHER; note = 2'-fluoroguanosine-3'-phosphate
  modified_base 9: mod_base = OTHER; note = 2'-fluoroguanosine-3'-phosphate
  modified_base 10: mod_base = OTHER; note = 2'-O-methyladenosine-3'-phosphate
  modified_base 11: mod_base = OTHER; note = 2'-O-methylcytidine-3'-phosphate
  modified_base 12: mod_base = OTHER; note = 2'-O-methyladenosine-3'-phosphate
  modified_base 13: mod_base = OTHER; note = 2'-O-methylguanosine-3'-phosphate
  modified_base 14: mod_base = OTHER; note = 2'-O-methyladenosine-3'-phosphate
  modified_base 15: mod_base = OTHER; note = 2'-O-methylguanosine-3'-phosphate
  modified_base 16: mod_base = OTHER; note = 2'-O-methyluridine-3'-phosphate
  modified_base 17: mod_base = OTHER; note = 2'-O-methyluridine-3'-phosphorothioate
  modified_base 18: mod_base = OTHER; note = 2'-O-methyladenosine-3'-phosphorothioate
  modified_base 19: mod_base = OTHER; note = 2'-O-methyluridine
cggtaatggacagagttat

SEQ ID NO: 2481 - RNA, 19 nt, synthetic construct
  source 1..19: mol_type = other RNA
  modified_base 1: mod_base = OTHER; note = 2'-O-methylcytidine-3'-phosphate
  modified_base 2: mod_base = OTHER; note = 2'-O-methylguanosine-3'-phosphate
  modified_base 3: mod_base = OTHER; note = 2'-O-methylguanosine-3'-phosphate
  modified_base 4: mod_base = OTHER; note = 2'-O-methyluridine-3'-phosphate
  modified_base 5: mod_base = OTHER; note = 2'-O-methyladenosine-3'-phosphate
  modified_base 6: mod_base = OTHER; note = 2'-O-methyladenosine-3'-phosphate
  modified_base 7: mod_base = OTHER; note = 2'-fluorouridine-3'-phosphate
  modified_base 8: mod_base = OTHER; note = 2'-fluoroguanosine-3'-phosphate
  modified_base 9: mod_base = OTHER; note = 2'-fluoroguanosine-3'-phosphate
  modified_base 10: mod_base = OTHER; note = 2'-O-methyladenosine-3'-phosphate
  modified_base 11: mod_base = OTHER; note = 2'-O-methylcytidine-3'-phosphate
  modified_base 12: mod_base = OTHER; note = 2'-O-methyladenosine-3'-phosphate
  modified_base 13: mod_base = OTHER; note = 2'-O-methylguanosine-3'-phosphate
  modified_base 14: mod_base = OTHER; note = 2'-O-methyladenosine-3'-phosphate
  modified_base 15: mod_base = OTHER; note = 2'-O-methylguanosine-3'-phosphate
  modified_base 16: mod_base = OTHER; note = 2'-O-methyluridine-3'-phosphate
  modified_base 17: mod_base = OTHER; note = 2'-O-methyluridine-3'-phosphorothioate
  modified_base 18: mod_base = OTHER; note = 2'-O-methyladenosine-3'-phosphorothioate
  modified_base 19: mod_base = OTHER; note = 2'-O-methyluridine
cggtaatggacagagttat

SEQ ID NO: 2482 - RNA, 19 nt, synthetic construct
  source 1..19: mol_type = other RNA
  modified_base 1: mod_base = OTHER; note = 2'-fluorocytidine-3'-phosphate
  modified_base 2: mod_base = OTHER; note = 2'-O-methylguanosine-3'-phosphate
  modified_base 3: mod_base = OTHER; note = 2'-fluoroguanosine-3'-phosphate
  modified_base 4: mod_base = OTHER; note = 2'-O-methyluridine-3'-phosphate
  modified_base 5: mod_base = OTHER; note = 2'-fluoroadenosine-3'-phosphate
  modified_base 6: mod_base = OTHER; note = 2'-O-methyladenosine-3'-phosphate
  modified_base 7: mod_base = OTHER; note = 2'-fluorouridine-3'-phosphate
  modified_base 8: mod_base = OTHER; note = 2'-O-methylguanosine-3'-phosphate
  modified_base 9: mod_base = OTHER; note = 2'-fluoroguanosine-3'-phosphate
  modified_base 10: mod_base = OTHER; note = 2'-O-methyladenosine-3'-phosphate
  modified_base 11: mod_base = OTHER; note = 2'-fluorocytidine-3'-phosphate
  modified_base 12: mod_base = OTHER; note = 2'-O-methyladenosine-3'-phosphate
  modified_base 13: mod_base = OTHER; note = 2'-fluoroguanosine-3'-phosphate
  modified_base 14: mod_base = OTHER; note = 2'-O-methyladenosine-3'-phosphate
  modified_base 15: mod_base = OTHER; note = 2'-fluoroguanosine-3'-phosphate
  modified_base 16: mod_base = OTHER; note = 2'-O-methyluridine-3'-phosphate
  modified_base 17: mod_base = OTHER; note = 2'-fluorouridine-3'-phosphate
  modified_base 18: mod_base = OTHER; note = 2'-O-methyladenosine-3'-phosphate
  modified_base 19: mod_base = OTHER; note = 2'-fluorouridine
cggtaatggacagagttat

SEQ ID NO: 2483 - RNA, 19 nt, synthetic construct
  source 1..19: mol_type = other RNA
  modified_base 1: mod_base = OTHER; note = 2'-O-methyladenosine-3'-phosphorothioate
  modified_base 2: mod_base = OTHER; note = 2'-fluorouridine-3'-phosphorothioate
  modified_base 3: mod_base = OTHER; note = 2'-O-methyladenosine-3'-phosphate
  modified_base 4: mod_base = OTHER; note = 2'-fluoroadenosine-3'-phosphate
  modified_base 5: mod_base = OTHER; note = 2'-O-methylcytidine-3'-phosphate
  modified_base 6: mod_base = OTHER; note = 2'-fluorouridine-3'-phosphate
  modified_base 7: mod_base = OTHER; note = 2'-O-methylcytidine-3'-phosphate
  modified_base 8: mod_base = OTHER; note = 2'-fluorouridine-3'-phosphate
  modified_base 9: mod_base = OTHER; note = 2'-O-methylguanosine-3'-phosphate
  modified_base 10: mod_base = OTHER; note = 2'-fluorouridine-3'-phosphate
  modified_base 11: mod_base = OTHER; note = 2'-O-methylcytidine-3'-phosphate
  modified_base 12: mod_base = OTHER; note = 2'-fluorocytidine-3'-phosphate
  modified_base 13: mod_base = OTHER; note = 2'-O-methyladenosine-3'-phosphate
  modified_base 14: mod_base = OTHER; note = 2'-fluorouridine-3'-phosphate
  modified_base 15: mod_base = OTHER; note = 2'-O-methyluridine-3'-phosphate
  modified_base 16: mod_base = OTHER; note = 2'-fluoroadenosine-3'-phosphate
  modified_base 17: mod_base = OTHER; note = 2'-O-methylcytidine-3'-phosphorothioate
  modified_base 18: mod_base = OTHER; note = 2'-fluorocytidine-3'-phosphorothioate
  modified_base 19: mod_base = OTHER; note = 2'-O-methylguanosine
ataactctgtccattaccg

SEQ ID NO: 2484 - RNA, 19 nt, synthetic construct
  source 1..19: mol_type = other RNA
  modified_base 1: mod_base = OTHER; note = 2'-O-methyladenosine-3'-phosphorothioate
  modified_base 2: mod_base = OTHER; note = 2'-fluorouridine-3'-phosphorothioate
  modified_base 3: mod_base = OTHER; note = 2'-O-methyladenosine-3'-phosphate
  modified_base 4: mod_base = OTHER; note = 2'-fluoroadenosine-3'-phosphate
  modified_base 5: mod_base = OTHER; note = 2'-O-methylcytidine-3'-phosphate
  modified_base 6: mod_base = OTHER; note = 2'-fluorouridine-3'-phosphate
  modified_base 7: mod_base = OTHER; note = 2'-O-methylcytidine-3'-phosphate
  modified_base 8: mod_base = OTHER; note = 2'-fluorouridine-3'-phosphate
  modified_base 9: mod_base = OTHER; note = 2'-O-methylguanosine-3'-phosphate
  modified_base 10: mod_base = OTHER; note = 2'-fluorouridine-3'-phosphate
  modified_base 11: mod_base = OTHER; note = 2'-O-methylcytidine-3'-phosphate
  modified_base 12: mod_base = OTHER; note = 2'-fluorocytidine-3'-phosphate
  modified_base 13: mod_base = OTHER; note = 2'-O-methyladenosine-3'-phosphate
  modified_base 14: mod_base = OTHER; note = 2'-fluorouridine-3'-phosphate
  modified_base 15: mod_base = OTHER; note = 2'-O-methyluridine-3'-phosphate
  modified_base 16: mod_base = OTHER; note = 2'-fluoroadenosine-3'-phosphate
  modified_base 17: mod_base = OTHER; note = 2'-O-methylcytidine-3'-phosphorothioate
  modified_base 18: mod_base = OTHER; note = 2'-fluorocytidine-3'-phosphorothioate
  modified_base 19: mod_base = OTHER; note = 2'-O-methylguanosine
ataactctgtccattaccg

SEQ ID NO: 2485 - RNA, 19 nt, synthetic construct
  source 1..19: mol_type = other RNA
  modified_base 1: mod_base = OTHER; note = 2'-O-methyladenosine-3'-phosphate
  modified_base 2: mod_base = OTHER; note = 2'-fluorouridine-3'-phosphate
  modified_base 3: mod_base = OTHER; note = 2'-O-methyladenosine-3'-phosphate
  modified_base 4: mod_base = OTHER; note = 2'-fluoroadenosine-3'-phosphate
  modified_base 5: mod_base = OTHER; note = 2'-O-methylcytidine-3'-phosphate
  modified_base 6: mod_base = OTHER; note = 2'-fluorouridine-3'-phosphate
  modified_base 7: mod_base = OTHER; note = 2'-O-methylcytidine-3'-phosphate
  modified_base 8: mod_base = OTHER; note = 2'-fluorouridine-3'-phosphate
  modified_base 9: mod_base = OTHER; note = 2'-O-methylguanosine-3'-phosphate
  modified_base 10: mod_base = OTHER; note = 2'-fluorouridine-3'-phosphate
  modified_base 11: mod_base = OTHER; note = 2'-O-methylcytidine-3'-phosphate
  modified_base 12: mod_base = OTHER; note = 2'-fluorocytidine-3'-phosphate
  modified_base 13: mod_base = OTHER; note = 2'-O-methyladenosine-3'-phosphate
  modified_base 14: mod_base = OTHER; note = 2'-fluorouridine-3'-phosphate
  modified_base 15: mod_base = OTHER; note = 2'-O-methyluridine-3'-phosphate
  modified_base 16: mod_base = OTHER; note = 2'-fluoroadenosine-3'-phosphate
  modified_base 17: mod_base = OTHER; note = 2'-O-methylcytidine-3'-phosphate
  modified_base 18: mod_base = OTHER; note = 2'-fluorocytidine-3'-phosphate
  modified_base 19: mod_base = OTHER; note = 2'-O-methylguanosine
ataactctgtccattaccg

SEQ ID NO: 2486 - RNA, 21 nt, synthetic construct
  source 1..21: mol_type = other RNA
caccagcttgtttgtgaaaca

SEQ ID NO: 2487 - RNA, 21 nt, synthetic construct
  source 1..21: mol_type = other RNA
tgtttcacaaacaagctggtg

SEQ ID NO: 2488 - RNA, 21 nt, synthetic construct
  source 1..21: mol_type = other RNA
  modified_base 1: mod_base = OTHER; note = 2'-O-methylguanosine-3'-phosphorothioate
  modified_base 2: mod_base = OTHER; note = 2'-O-methyladenosine-3'-phosphorothioate
  modified_base 3: mod_base = OTHER; note = 2'-O-methylcytidine-3'-phosphate
  modified_base 4: mod_base = OTHER; note = 2'-O-methylcytidine-3'-phosphate
  modified_base 5: mod_base = OTHER; note = 2'-O-methyladenosine-3'-phosphate
  modified_base 6: mod_base = OTHER; note = 2'-O-methylguanosine-3'-phosphate
  modified_base 7: mod_base = OTHER; note = 2'-O-methylcytidine-3'-phosphate
  modified_base 8: mod_base = OTHER; note = 2'-O-methyluridine-3'-phosphate
  modified_base 9: mod_base = OTHER; note = 2'-fluorouridine-3'-phosphate
  modified_base 10: mod_base = OTHER; note = 2'-O-methylguanosine-3'-phosphate
  modified_base 11: mod_base = OTHER; note = 2'-fluorouridine-3'-phosphate
  modified_base 12: mod_base = OTHER; note = 2'-O-methyluridine-3'-phosphate
  modified_base 13: mod_base = OTHER; note = 2'-fluorouridine-3'-phosphate
  modified_base 14: mod_base = OTHER; note = 2'-O-methylguanosine-3'-phosphate
  modified_base 15: mod_base = OTHER; note = 2'-O-methyluridine-3'-phosphate
  modified_base 16: mod_base = OTHER; note = 2'-O-methylguanosine-3'-phosphate
  modified_base 17: mod_base = OTHER; note = 2'-O-methyladenosine-3'-phosphate
  modified_base 18: mod_base = OTHER; note = 2'-O-methyladenosine-3'-phosphate
  modified_base 19: mod_base = OTHER; note = 2'-O-methyladenosine-3'-phosphate
  modified_base 20: mod_base = OTHER; note = 2'-O-methylcytidine-3'-phosphorothioate
  modified_base 21: mod_base = OTHER; note = 2'-O-methyladenosine
gaccagcttgtttgtgaaaca

SEQ ID NO: 2489 - RNA, 21 nt, synthetic construct
  source 1..21: mol_type = other RNA
  modified_base 1: mod_base = OTHER; note = 2'-O-methyluridine-3'-phosphorothioate
  modified_base 2: mod_base = OTHER; note = 2'-fluoroguanosine-3'-phosphorothioate
  modified_base 3: mod_base = OTHER; note = 2'-O-methyluridine-3'-phosphate
  modified_base 4: mod_base = OTHER; note = 2'-O-methyluridine-3'-phosphate
  modified_base 5: mod_base = OTHER; note = 2'-O-methyluridine-3'-phosphate
  modified_base 6: mod_base = OTHER; note = 2'-O-methylcytidine-3'-phosphate
  modified_base 7: mod_base = OTHER; note = 2'-fluoroadenosine-3'-phosphate
  modified_base 8: mod_base = OTHER; note = 2'-O-methylcytidine-3'-phosphate
  modified_base 9: mod_base = OTHER; note = 2'-O-methyladenosine-3'-phosphate
  modified_base 10: mod_base = OTHER; note = 2'-O-methyladenosine-3'-phosphate
  modified_base 11: mod_base = OTHER; note = 2'-O-methyladenosine-3'-phosphate
  modified_base 12: mod_base = OTHER; note = 2'-fluorocytidine-3'-phosphate
  modified_base 13: mod_base = OTHER; note = 2'-O-methyladenosine-3'-phosphate
  modified_base 14: mod_base = OTHER; note = 2'-fluoroadenosine-3'-phosphate
  modified_base 15: mod_base = OTHER; note = 2'-O-methylguanosine-3'-phosphate
  modified_base 16: mod_base = OTHER; note = 2'-fluorocytidine-3'-phosphate
  modified_base 17: mod_base = OTHER; note = 2'-O-methyluridine-3'-phosphate
  modified_base 18: mod_base = OTHER; note = 2'-O-methylguanosine-3'-phosphate
  modified_base 19: mod_base = OTHER; note = 2'-O-methylguanosine-3'-phosphorothioate
  modified_base 20: mod_base = OTHER; note = 2'-O-methyluridine-3'-phosphorothioate
  modified_base 21: mod_base = OTHER; note = 2'-O-methylcytidine
tgtttcacaaacaagctggtc

SEQ ID NO: 2490 - RNA, 21 nt, synthetic construct
  source 1..21: mol_type = other RNA
  modified_base 1: mod_base = OTHER; note = 2'-O-methylcytidine-3'-phosphate
  modified_base 2: mod_base = OTHER; note = 2'-O-methyladenosine-3'-phosphate
  modified_base 3: mod_base = OTHER; note = 2'-O-methylcytidine-3'-phosphate
  modified_base 4: mod_base = OTHER; note = 2'-O-methylcytidine-3'-phosphate
  modified_base 5: mod_base = OTHER; note = 2'-O-methyladenosine-3'-phosphate
  modified_base 6: mod_base = OTHER; note = 2'-O-methylguanosine-3'-phosphate
  modified_base 7: mod_base = OTHER; note = 2'-O-methylcytidine-3'-phosphate
  modified_base 8: mod_base = OTHER; note = 2'-O-methyluridine-3'-phosphate
  modified_base 9: mod_base = OTHER; note = 2'-fluorouridine-3'-phosphate
  modified_base 10: mod_base = OTHER; note = 2'-O-methylguanosine-3'-phosphate
  modified_base 11: mod_base = OTHER; note = 2'-fluorouridine-3'-phosphate
  modified_base 12: mod_base = OTHER; note = 2'-O-methyluridine-3'-phosphate
  modified_base 13: mod_base = OTHER; note = 2'-fluorouridine-3'-phosphate
  modified_base 14: mod_base = OTHER; note = 2'-O-methylguanosine-3'-phosphate
  modified_base 15: mod_base = OTHER; note = 2'-O-methyluridine-3'-phosphate
  modified_base 16: mod_base = OTHER; note = 2'-O-methylguanosine-3'-phosphate
  modified_base 17: mod_base = OTHER; note = 2'-O-methyladenosine-3'-phosphate
  modified_base 18: mod_base = OTHER; note = 2'-O-methyladenosine-3'-phosphate
  modified_base 19: mod_base = OTHER; note = 2'-O-methyladenosine-3'-phosphate
  modified_base 20: mod_base = OTHER; note = 2'-O-methylcytidine-3'-phosphate
  modified_base 21: mod_base = OTHER; note = 2'-O-methyladenosine
  misc_feature 1: note = Nucleotide linked to an inverted abasic nucleotide via a 5'-5'-phosphorothioate linkage
  misc_feature 21: note = Nucleotide linked to an inverted abasic nucleotide via a 3'-3'-phosphorothioate linkage
caccagcttgtttgtgaaaca

SEQ ID NO: 2491 - RNA, 21 nt, synthetic construct
  source 1..21: mol_type = other RNA
  modified_base 1: mod_base = OTHER; note = 2'-O-methyluridine-3'-phosphorothioate
  modified_base 2: mod_base = OTHER; note = 2'-fluoroguanosine-3'-phosphorothioate
  modified_base 3: mod_base = OTHER; note = 2'-O-methyluridine-3'-phosphate
  modified_base 4: mod_base = OTHER; note = 2'-O-methyluridine-3'-phosphate
  modified_base 5: mod_base = OTHER; note = 2'-O-methyluridine-3'-phosphate
  modified_base 6: mod_base = OTHER; note = 2'-O-methylcytidine-3'-phosphate
  modified_base 7: mod_base = OTHER; note = 2'-fluoroadenosine-3'-phosphate
  modified_base 8: mod_base = OTHER; note = 2'-O-methylcytidine-3'-phosphate
  modified_base 9: mod_base = OTHER; note = 2'-O-methyladenosine-3'-phosphate
  modified_base 10: mod_base = OTHER; note = 2'-O-methyladenosine-3'-phosphate
  modified_base 11: mod_base = OTHER; note = 2'-O-methyladenosine-3'-phosphate
  modified_base 12: mod_base = OTHER; note = 2'-fluorocytidine-3'-phosphate
  modified_base 13: mod_base = OTHER; note = 2'-O-methyladenosine-3'-phosphate
  modified_base 14: mod_base = OTHER; note = 2'-fluoroadenosine-3'-phosphate
  modified_base 15: mod_base = OTHER; note = 2'-O-methylguanosine-3'-phosphate
  modified_base 16: mod_base = OTHER; note = 2'-fluorocytidine-3'-phosphate
  modified_base 17: mod_base = OTHER; note = 2'-O-methyluridine-3'-phosphate
  modified_base 18: mod_base = OTHER; note = 2'-O-methylguanosine-3'-phosphate
  modified_base 19: mod_base = OTHER; note = 2'-O-methylguanosine-3'-phosphorothioate
  modified_base 20: mod_base = OTHER; note = 2'-O-methyluridine-3'-phosphorothioate
  modified_base 21: mod_base = OTHER; note = 2'-O-methylguanosine
tgtttcacaaacaagctggtg

SEQ ID NO: 2492 - RNA, 21 nt, synthetic construct
  source 1..21: mol_type = other RNA
  modified_base 1: mod_base = OTHER; note = 2'-O-methylcytidine-3'-phosphate
  modified_base 2: mod_base = OTHER; note = 2'-O-methyladenosine-3'-phosphate
  modified_base 3: mod_base = OTHER; note = 2'-O-methylcytidine-3'-phosphate
  modified_base 4: mod_base = OTHER; note = 2'-O-methylcytidine-3'-phosphate
  modified_base 5: mod_base = OTHER; note = 2'-O-methyladenosine-3'-phosphate
  modified_base 6: mod_base = OTHER; note = 2'-O-methylguanosine-3'-phosphate
  modified_base 7: mod_base = OTHER; note = 2'-O-methylcytidine-3'-phosphate
  modified_base 8: mod_base = OTHER; note = 2'-O-methyluridine-3'-phosphate
  modified_base 9: mod_base = OTHER; note = 2'-fluorouridine-3'-phosphate
  modified_base 10: mod_base = OTHER; note = 2'-O-methylguanosine-3'-phosphate
  modified_base 11: mod_base = OTHER; note = 2'-fluorouridine-3'-phosphate
  modified_base 12: mod_base = OTHER; note = 2'-O-methyluridine-3'-phosphate
  modified_base 13: mod_base = OTHER; note = 2'-fluorouridine-3'-phosphate
  modified_base 14: mod_base = OTHER; note = 2'-O-methylguanosine-3'-phosphate
  modified_base 15: mod_base = OTHER; note = 2'-O-methyluridine-3'-phosphate
  modified_base 16: mod_base = OTHER; note = 2'-O-methylguanosine-3'-phosphate
  modified_base 17: mod_base = OTHER; note = 2'-O-methyladenosine-3'-phosphate
  modified_base 18: mod_base = OTHER; note = 2'-O-methyladenosine-3'-phosphate
  modified_base 19: mod_base = OTHER; note = 2'-O-methyladenosine-3'-phosphate
  modified_base 20: mod_base = OTHER; note = 2'-O-methylcytidine-3'-phosphate
  modified_base 21: mod_base = OTHER; note = 2'-O-methyladenosine
  misc_feature 1: note = Nucleotide linked to an inverted abasic nucleotide via a 5'-5'-phosphorothioate linkage
  misc_feature 21: note = Nucleotide linked to an inverted abasic nucleotide via a 3'-3'-phosphorothioate linkage
caccagcttgtttgtgaaaca

SEQ ID NO: 2493 - RNA, 21 nt, synthetic construct
  source 1..21: mol_type = other RNA
  modified_base 1: mod_base = OTHER; note = 2'-O-methylguanosine-3'-phosphate
  modified_base 2: mod_base = OTHER; note = 2'-O-methyladenosine-3'-phosphate
  modified_base 3: mod_base = OTHER; note = 2'-O-methylcytidine-3'-phosphate
  modified_base 4: mod_base = OTHER; note = 2'-O-methylcytidine-3'-phosphate
  modified_base 5: mod_base = OTHER; note = 2'-O-methyluridine-3'-phosphate
  modified_base 6: mod_base = OTHER; note = 2'-O-methyluridine-3'-phosphate
  modified_base 7: mod_base = OTHER; note = 2'-O-methyluridine-3'-phosphate
  modified_base 8: mod_base = OTHER; note = 2'-O-methyluridine-3'-phosphate
  modified_base 9: mod_base = OTHER; note = 2'-fluorocytidine-3'-phosphate
  modified_base 10: mod_base = OTHER; note = 2'-O-methyluridine-3'-phosphate
  modified_base 11: mod_base = OTHER; note = 2'-fluorouridine-3'-phosphate
  modified_base 12: mod_base = OTHER; note = 2'-O-methylcytidine-3'-phosphate
  modified_base 13: mod_base = OTHER; note = 2'-fluorouridine-3'-phosphate
  modified_base 14: mod_base = OTHER; note = 2'-O-methyladenosine-3'-phosphate
  modified_base 15: mod_base = OTHER; note = 2'-O-methyladenosine-3'-phosphate
  modified_base 16: mod_base = OTHER; note = 2'-O-methyluridine-3'-phosphate
  modified_base 17: mod_base = OTHER; note = 2'-O-methylguanosine-3'-phosphate
  modified_base 18: mod_base = OTHER; note = 2'-O-methyladenosine-3'-phosphate
  modified_base 19: mod_base = OTHER; note = 2'-O-methylguanosine-3'-phosphate
  modified_base 20: mod_base = OTHER; note = 2'-O-methyluridine-3'-phosphate
  modified_base 21: mod_base = OTHER; note = 2'-O-methyladenosine
  misc_feature 1: note = Nucleotide linked to an inverted abasic nucleotide via a 5'-5'-phosphorothioate linkage
  misc_feature 21: note = Nucleotide linked to an inverted abasic nucleotide via a 3'-3'-phosphorothioate linkage
gaccttttcttctaatgagta

SEQ ID NO: 2494 - RNA, 21 nt, synthetic construct
  source 1..21: mol_type = other RNA
  modified_base 1: mod_base = OTHER; note = 2'-O-methylguanosine-3'-phosphate
  modified_base 2: mod_base = OTHER; note = 2'-O-methyladenosine-3'-phosphate
  modified_base 3: mod_base = OTHER; note = 2'-O-methylcytidine-3'-phosphate
  modified_base 4: mod_base = OTHER; note = 2'-O-methylcytidine-3'-phosphate
  modified_base 5: mod_base = OTHER; note = 2'-O-methyluridine-3'-phosphate
  modified_base 6: mod_base = OTHER; note = 2'-O-methyluridine-3'-phosphate
  modified_base 7: mod_base = OTHER; note = 2'-O-methyluridine-3'-phosphate
  modified_base 8: mod_base = OTHER; note = 2'-O-methylcytidine-3'-phosphate
  modified_base 9: mod_base = OTHER; note = 2'-fluorouridine-3'-phosphate
  modified_base 10: mod_base = OTHER; note = 2'-O-methyluridine-3'-phosphate
  modified_base 11: mod_base = OTHER; note = 2'-fluorouridine-3'-phosphate
  modified_base 12: mod_base = OTHER; note = 2'-O-methylcytidine-3'-phosphate
  modified_base 13: mod_base = OTHER; note = 2'-fluorouridine-3'-phosphate
  modified_base 14: mod_base = OTHER; note = 2'-O-methyladenosine-3'-phosphate
  modified_base 15: mod_base = OTHER; note = 2'-O-methylguanosine-3'-phosphate
  modified_base 16: mod_base = OTHER; note = 2'-O-methylcytidine-3'-phosphate
  modified_base 17: mod_base = OTHER; note = 2'-O-methylguanosine-3'-phosphate
  modified_base 18: mod_base = OTHER; note = 2'-O-methyladenosine-3'-phosphate
  modified_base 19: mod_base = OTHER; note = 2'-O-methylguanosine-3'-phosphate
  modified_base 20: mod_base = OTHER; note = 2'-O-methyluridine-3'-phosphate
  modified_base 21: mod_base = OTHER; note = 2'-O-methyladenosine
  misc_feature 1: note = Nucleotide linked to an inverted abasic nucleotide via a 5'-5'-phosphorothioate linkage
  misc_feature 21: note = Nucleotide linked to an inverted abasic nucleotide via a 3'-3'-phosphorothioate linkage
gacctttctttctagcgagta

SEQ ID NO: 2495 - RNA, 21 nt, synthetic construct
  source 1..21: mol_type = other RNA
  modified_base 1: mod_base = OTHER; note = 2'-O-methylcytidine-3'-phosphate
  modified_base 2: mod_base = OTHER; note = 2'-O-methyladenosine-3'-phosphate
  modified_base 3: mod_base = OTHER; note = 2'-O-methylcytidine-3'-phosphate
  modified_base 4: mod_base = OTHER; note = 2'-O-methylcytidine-3'-phosphate
  modified_base 5: mod_base = OTHER; note = 2'-O-methyladenosine-3'-phosphate
  modified_base 6: mod_base = OTHER; note = 2'-O-methylguanosine-3'-phosphate
  modified_base 7: mod_base = OTHER; note = 2'-O-methylcytidine-3'-phosphate
  modified_base 8: mod_base = OTHER; note = 2'-O-methyluridine-3'-phosphate
  modified_base 9: mod_base = OTHER; note = 2'-fluorouridine-3'-phosphate
  modified_base 10: mod_base = OTHER; note = 2'-O-methylguanosine-3'-phosphate
  modified_base 11: mod_base = OTHER; note = 2'-fluorouridine-3'-phosphate
  modified_base 12: mod_base = OTHER; note = 2'-O-methyluridine-3'-phosphate
  modified_base 13: mod_base = OTHER; note = 2'-fluorouridine-3'-phosphate
  modified_base 14: mod_base = OTHER; note = 2'-O-methylguanosine-3'-phosphate
  modified_base 15: mod_base = OTHER; note = 2'-O-methyluridine-3'-phosphate
  modified_base 16: mod_base = OTHER; note = 2'-O-methylguanosine-3'-phosphate
  modified_base 17: mod_base = OTHER; note = 2'-O-methyladenosine-3'-phosphate
  modified_base 18: mod_base = OTHER; note = 2'-O-methyladenosine-3'-phosphate
  modified_base 19: mod_base = OTHER; note = 2'-O-methyladenosine-3'-phosphate
  modified_base 20: mod_base = OTHER; note = 2'-O-methylcytidine-3'-phosphate
  modified_base 21: mod_base = OTHER; note = 2'-O-methyladenosine
  misc_feature 1: note = Nucleotide linked to an inverted abasic nucleotide via a 5'-5'-phosphorothioate linkage
  misc_feature 21: note = Nucleotide linked to an inverted abasic nucleotide via a 3'-3'-phosphorothioate linkage
caccagcttgtttgtgaaaca

SEQ ID NO: 2496 - RNA, 21 nt, synthetic construct
  source 1..21: mol_type = other RNA
  modified_base 1: mod_base = OTHER; note = 2'-O-methylguanosine-3'-phosphate
  modified_base 2: mod_base = OTHER; note = 2'-O-methylcytidine-3'-phosphate
  modified_base 3: mod_base = OTHER; note = 2'-O-methylguanosine-3'-phosphate
  modified_base 4: mod_base = OTHER; note = 2'-O-methyluridine-3'-phosphate
  modified_base 5: mod_base = OTHER; note = 2'-O-methyluridine-3'-phosphate
  modified_base 6: mod_base = OTHER; note = 2'-O-methyluridine-3'-phosphate
  modified_base 7: mod_base = OTHER; note = 2'-O-methylcytidine-3'-phosphate
  modified_base 8: mod_base = OTHER; note = 2'-O-methyluridine-3'-phosphate
  modified_base 9: mod_base = OTHER; note = 2'-fluorocytidine-3'-phosphate
  modified_base 10: mod_base = OTHER; note = 2'-O-methylcytidine-3'-phosphate
  modified_base 11: mod_base = OTHER; note = 2'-fluorouridine-3'-phosphate
  modified_base 12: mod_base = OTHER; note = 2'-O-methyluridine-3'-phosphate
  modified_base 13: mod_base = OTHER; note = 2'-fluoroguanosine-3'-phosphate
  modified_base 14: mod_base = OTHER; note = 2'-O-methylguanosine-3'-phosphate
  modified_base 15: mod_base = OTHER; note = 2'-O-methyluridine-3'-phosphate
  modified_base 16: mod_base = OTHER; note = 2'-O-methylcytidine-3'-phosphate
  modified_base 17: mod_base = OTHER; note = 2'-O-methyluridine-3'-phosphate
  modified_base 18: mod_base = OTHER; note = 2'-O-methyladenosine-3'-phosphate
  modified_base 19: mod_base = OTHER; note = 2'-O-methyladenosine-3'-phosphate
  modified_base 20: mod_base = OTHER; note = 2'-O-methylguanosine-3'-phosphate
  modified_base 21: mod_base = OTHER; note = 2'-O-methyladenosine
  misc_feature 1: note = Nucleotide linked to an inverted abasic nucleotide via a 5'-5'-phosphorothioate linkage
  misc_feature 21: note = Nucleotide linked to an inverted abasic nucleotide via a 3'-3'-phosphorothioate linkage
gcgtttctccttggtctaaga

SEQ ID NO: 2497 - RNA, 21 nt, synthetic construct
  source 1..21: mol_type = other RNA
  modified_base 1: mod_base = OTHER; note = 2'-O-methylguanosine-3'-phosphate
  modified_base 2: mod_base = OTHER; note = 2'-O-methylcytidine-3'-phosphate
  modified_base 3: mod_base = OTHER; note = 2'-O-methyladenosine-3'-phosphate
  modified_base 4: mod_base = OTHER; note = 2'-O-methyladenosine-3'-phosphate
  modified_base 5: mod_base = OTHER; note = 2'-O-methyladenosine-3'-phosphate
  modified_base 6: mod_base = OTHER; note = 2'-O-methyladenosine-3'-phosphate
  modified_base 7: mod_base = OTHER; note = 2'-O-methyladenosine-3'-phosphate
  modified_base 8: mod_base = OTHER; note = 2'-O-methylguanosine-3'-phosphate
  modified_base 9: mod_base = OTHER; note = 2'-fluoroadenosine-3'-phosphate
  modified_base 10: mod_base = OTHER; note = 2'-O-methyladenosine-3'-phosphate
  modified_base 11: mod_base = OTHER; note = 2'-fluorouridine-3'-phosphate
  modified_base 12: mod_base = OTHER; note = 2'-O-methyluridine-3'-phosphate
  modified_base 13: mod_base = OTHER; note = 2'-fluorocytidine-3'-phosphate
  modified_base 14: mod_base = OTHER; note = 2'-O-methylcytidine-3'-phosphate
  modified_base 15: mod_base = OTHER; note = 2'-O-methyladenosine-3'-phosphate
  modified_base 16: mod_base = OTHER; note = 2'-O-methyladenosine-3'-phosphate
  modified_base 17: mod_base = OTHER; note = 2'-O-methylcytidine-3'-phosphate
  modified_base 18: mod_base = OTHER; note = 2'-O-methylcytidine-3'-phosphate
  modified_base 19: mod_base = OTHER; note = 2'-O-methylguanosine-3'-phosphate
  modified_base 20: mod_base = OTHER; note = 2'-O-methyladenosine-3'-phosphate
  modified_base 21: mod_base = OTHER; note = 2'-O-methyladenosine
  misc_feature 1: note = Nucleotide linked to an inverted abasic nucleotide via a 5'-5'-phosphorothioate linkage
  misc_feature 21: note = Nucleotide linked to an inverted abasic nucleotide via a 3'-3'-phosphorothioate linkage
gcaaaaagaattccaaccgaa

SEQ ID NO: 2498 - RNA, 21 nt, synthetic construct
  source 1..21: mol_type = other RNA
  modified_base 1: mod_base = OTHER; note = 2'-O-methyluridine-3'-phosphorothioate
  modified_base 2: mod_base = OTHER; note = 2'-fluoroguanosine-3'-phosphorothioate
  modified_base 3: mod_base = OTHER; note = 2'-O-methyluridine-3'-phosphate
  modified_base 4: mod_base = OTHER; note = 2'-O-methyluridine-3'-phosphate
  modified_base 5: mod_base = OTHER; note = 2'-O-methyluridine-3'-phosphate
  modified_base 6: mod_base = OTHER; note = 2'-O-methylcytidine-3'-phosphate
  modified_base 7: mod_base = OTHER; note = 2'-fluoroadenosine-3'-phosphate
  modified_base 8: mod_base = OTHER; note = 2'-O-methylcytidine-3'-phosphate
  modified_base 9: mod_base = OTHER; note = 2'-O-methyladenosine-3'-phosphate
  modified_base 10: mod_base = OTHER; note = 2'-O-methyladenosine-3'-phosphate
  modified_base 11: mod_base = OTHER; note = 2'-O-methyladenosine-3'-phosphate
  modified_base 12: mod_base = OTHER; note = 2'-fluorocytidine-3'-phosphate
  modified_base 13: mod_base = OTHER; note = 2'-O-methyladenosine-3'-phosphate
  modified_base 14: mod_base = OTHER; note = 2'-fluoroadenosine-3'-phosphate
  modified_base 15: mod_base = OTHER; note = 2'-O-methylguanosine-3'-phosphate
  modified_base 16: mod_base = OTHER; note = 2'-fluorocytidine-3'-phosphate
  modified_base 17: mod_base = OTHER; note = 2'-O-methyluridine-3'-phosphate
  modified_base 18: mod_base = OTHER; note = 2'-O-methylguanosine-3'-phosphate
  modified_base 19: mod_base = OTHER; note = 2'-O-methylguanosine-3'-phosphorothioate
  modified_base 20: mod_base = OTHER; note = 2'-O-methyluridine-3'-phosphorothioate
  modified_base 21: mod_base = OTHER; note = 2'-O-methylguanosine-3'-phosphate
tgtttcacaaacaagctggtg

SEQ ID NO: 2499 - RNA, 21 nt, synthetic construct
  source 1..21: mol_type = other RNA
  modified_base 1: mod_base = OTHER; note = 2'-O-methyluridine-3'-phosphorothioate
  modified_base 2: mod_base = OTHER; note = 2'-fluoroadenosine-3'-phosphorothioate
  modified_base 3: mod_base = OTHER; note = 2'-O-methylcytidine-3'-phosphate
  modified_base 4: mod_base = OTHER; note = 2'-O-methyluridine-3'-phosphate
  modified_base 5: mod_base = OTHER; note = 2'-O-methylcytidine-3'-phosphate
  modified_base 6: mod_base = OTHER; note = 2'-O-methyladenosine-3'-phosphate
  modified_base 7: mod_base = OTHER; note = 2'-fluorouridine-3'-phosphate
  modified_base 8: mod_base = OTHER; note = 2'-O-methyluridine-3'-phosphate
  modified_base 9: mod_base = OTHER; note = 2'-O-methyladenosine-3'-phosphate
  modified_base 10: mod_base = OTHER; note = 2'-O-methylguanosine-3'-phosphate
  modified_base 11: mod_base = OTHER; note = 2'-O-methyladenosine-3'-phosphate
  modified_base 12: mod_base = OTHER; note = 2'-fluoroadenosine-3'-phosphate
  modified_base 13: mod_base = OTHER; note = 2'-O-methylguanosine-3'-phosphate
  modified_base 14: mod_base = OTHER; note = 2'-fluoroadenosine-3'-phosphate
  modified_base 15: mod_base = OTHER; note = 2'-O-methyladenosine-3'-phosphate
  modified_base 16: mod_base = OTHER; note = 2'-fluoroadenosine-3'-phosphate
  modified_base 17: mod_base = OTHER; note = 2'-O-methyladenosine-3'-phosphate
  modified_base 18: mod_base = OTHER; note = 2'-O-methylguanosine-3'-phosphate
  modified_base 19: mod_base = OTHER; note = 2'-O-methylguanosine-3'-phosphorothioate
  modified_base 20: mod_base = OTHER; note = 2'-O-methyluridine-3'-phosphorothioate
  modified_base 21: mod_base = OTHER; note = 2'-O-methylcytidine-3'-phosphate
tactcattagaagaaaaggtc

SEQ ID NO: 2500 - RNA, 21 nt, synthetic construct
  source 1..21: mol_type = other RNA
  modified_base 1: mod_base = OTHER; note = 2'-O-methyluridine-3'-phosphorothioate
  modified_base 2: mod_base = OTHER; note = 2'-fluoroadenosine-3'-phosphorothioate
  modified_base 3: mod_base = OTHER; note = 2'-O-methylcytidine-3'-phosphate
  modified_base 4: mod_base = OTHER; note = 2'-O-methyluridine-3'-phosphate
  modified_base 5: mod_base = OTHER; note = 2'-O-methylcytidine-3'-phosphate
  modified_base 6: mod_base = OTHER; note = 2'-O-methyladenosine-3'-phosphate
  modified_base 7: mod_base = OTHER; note = 2'-fluorouridine-3'-phosphate
  modified_base 8: mod_base = OTHER; note = 2'-O-methyluridine-3'-phosphate
  modified_base 9: mod_base = OTHER; note = 2'-O-methyladenosine-3'-phosphate
  modified_base 10: mod_base = OTHER; note = 2'-O-methylguanosine-3'-phosphate
  modified_base 11: mod_base = OTHER; note = 2'-O-methyladenosine-3'-phosphate
  modified_base 12: mod_base = OTHER; note = 2'-fluoroadenosine-3'-phosphate
  modified_base 13: mod_base = OTHER; note = 2'-O-methylguanosine-3'-phosphate
  modified_base 14: mod_base = OTHER; note = 2'-fluoroadenosine-3'-phosphate
  modified_base 15: mod_base = OTHER; note = 2'-O-methyladenosine-3'-phosphate
  modified_base 16: mod_base = OTHER; note = 2'-fluoroadenosine-3'-phosphate
  modified_base 17: mod_base = OTHER; note = 2'-O-methyladenosine-3'-phosphate
  modified_base 18: mod_base = OTHER; note = 2'-O-methylguanosine-3'-phosphate
  modified_base 19: mod_base = OTHER; note = 2'-O-methylguanosine-3'-phosphorothioate
  modified_base 20: mod_base = OTHER; note = 2'-O-methyluridine-3'-phosphorothioate
  modified_base 21: mod_base = OTHER; note = 2'-O-methylcytidine-3'-phosphate
tactcattagaagaaaaggtc

SEQ ID NO: 2501 - RNA, 21 nt, synthetic construct
  source 1..21: mol_type = other RNA
  modified_base 1: mod_base = OTHER; note = 2'-O-methyluridine-3'-phosphorothioate
  modified_base 2: mod_base = OTHER; note = 2'-fluoroguanosine-3'-phosphorothioate
  modified_base 3: mod_base = OTHER; note = 2'-O-methyluridine-3'-phosphate
  modified_base 4: mod_base = OTHER; note = 2'-O-methyluridine-3'-phosphate
  modified_base 5: mod_base = OTHER; note = 2'-O-methyluridine-3'-phosphate
  modified_base 6: mod_base = OTHER; note = 2'-O-methylcytidine-3'-phosphate
  modified_base 7: mod_base = OTHER; note = 2'-fluoroadenosine-3'-phosphate
  modified_base 8: mod_base = OTHER; note = 2'-O-methylcytidine-3'-phosphate
  modified_base 9: mod_base = OTHER; note = 2'-O-methyladenosine-3'-phosphate
  modified_base 10: mod_base = OTHER; note = 2'-O-methyladenosine-3'-phosphate
  modified_base 11: mod_base = OTHER; note = 2'-O-methyladenosine-3'-phosphate
  modified_base 12: mod_base = OTHER; note = 2'-fluorocytidine-3'-phosphate
  modified_base 13: mod_base = OTHER; note = 2'-O-methyladenosine-3'-phosphate
  modified_base 14: mod_base = OTHER; note = 2'-fluoroadenosine-3'-phosphate
  modified_base 15: mod_base = OTHER; note = 2'-O-methylguanosine-3'-phosphate
  modified_base 16: mod_base = OTHER; note = 2'-fluorocytidine-3'-phosphate
  modified_base 17: mod_base = OTHER; note = 2'-O-methyluridine-3'-phosphate
  modified_base 18: mod_base = OTHER; note = 2'-O-methylguanosine-3'-phosphate
  modified_base 19: mod_base = OTHER; note = 2'-O-methylguanosine-3'-phosphorothioate
  modified_base 20: mod_base = OTHER; note = 2'-O-methyluridine-3'-phosphorothioate
  modified_base 21: mod_base = OTHER; note = 2'-O-methylguanosine-3'-phosphate
tgtttcacaaacaagctggtg

SEQ ID NO: 2502 - RNA, 21 nt, synthetic construct
  source 1..21: mol_type = other RNA
  modified_base 1: mod_base = OTHER; note = 2'-O-methyluridine-3'-phosphorothioate
  modified_base 2: mod_base = OTHER; note = 2'-fluorocytidine-3'-phosphorothioate
  modified_base 3: mod_base = OTHER; note = 2'-O-methyluridine-3'-phosphate
  modified_base 4: mod_base = OTHER; note = 2'-O-methyluridine-3'-phosphate
  modified_base 5: mod_base = OTHER; note = 2'-O-methyladenosine-3'-phosphate
  modified_base 6: mod_base = OTHER; note = 2'-O-methylguanosine-3'-phosphate
  modified_base 7: mod_base = OTHER; note = 2'-fluoroadenosine-3'-phosphate
  modified_base 8: mod_base = OTHER; note = 2'-O-methylcytidine-3'-phosphate
  modified_base 9: mod_base = OTHER; note = 2'-O-methylcytidine-3'-phosphate
  modified_base 10: mod_base = OTHER; note = 2'-O-methyladenosine-3'-phosphate
  modified_base 11: mod_base = OTHER; note = 2'-O-methyladenosine-3'-phosphate
  modified_base 12: mod_base = OTHER; note = 2'-fluoroguanosine-3'-phosphate
  modified_base 13: mod_base = OTHER; note = 2'-O-methylguanosine-3'-phosphate
  modified_base 14: mod_base = OTHER; note = 2'-fluoroadenosine-3'-phosphate
  modified_base 15: mod_base = OTHER; note = 2'-O-methylguanosine-3'-phosphate
  modified_base 16: mod_base = OTHER; note = 2'-fluoroadenosine-3'-phosphate
  modified_base 17: mod_base = OTHER; note = 2'-O-methyladenosine-3'-phosphate
  modified_base 18: mod_base = OTHER; note = 2'-O-methyladenosine-3'-phosphate
  modified_base 19: mod_base = OTHER; note = 2'-O-methylcytidine-3'-phosphorothioate
  modified_base 20: mod_base = OTHER; note = 2'-O-methylguanosine-3'-phosphorothioate
  modified_base 21: mod_base = OTHER; note = 2'-O-methylcytidine-3'-phosphate
tcttagaccaaggagaaacgc

SEQ ID NO: 2503 - RNA, 21 nt, synthetic construct
  source 1..21: mol_type = other RNA
  modified_base 1: mod_base = OTHER; note = 2'-O-methyluridine-3'-phosphorothioate
  modified_base 2: mod_base = OTHER; note = 2'-fluorouridine-3'-phosphorothioate
  modified_base 3: mod_base = OTHER; note = 2'-O-methylcytidine-3'-phosphate
  modified_base 4: mod_base = OTHER; note = 2'-O-methylguanosine-3'-phosphate
  modified_base 5: mod_base = OTHER; note = 2'-fluoroguanosine-3'-phosphate
  modified_base 6: mod_base = OTHER; note = 2'-O-methyluridine-3'-phosphate
  modified_base 7: mod_base = OTHER; note = uridine-unlocked nucleic acid-3'-phosphate
  modified_base 8: mod_base = OTHER; note = 2'-O-methylguanosine-3'-phosphate
  modified_base 9: mod_base = OTHER; note = 2'-O-methylguanosine-3'-phosphate
  modified_base 10: mod_base = OTHER; note = 2'-O-methyladenosine-3'-phosphate
  modified_base 11: mod_base = OTHER; note = 2'-O-methyladenosine-3'-phosphate
  modified_base 12: mod_base = OTHER; note = 2'-fluorouridine-3'-phosphate
  modified_base 13: mod_base = OTHER; note = 2'-O-methyluridine-3'-phosphate
  modified_base 14: mod_base = OTHER; note = 2'-fluorocytidine-3'-phosphate
  modified_base 15: mod_base = OTHER; note = 2'-O-methyluridine-3'-phosphate
  modified_base 16: mod_base = OTHER; note = 2'-fluorouridine-3'-phosphate
  modified_base 17: mod_base = OTHER; note = 2'-O-methyluridine-3'-phosphate
  modified_base 18: mod_base = OTHER; note = 2'-O-methyluridine-3'-phosphate
  modified_base 19: mod_base = OTHER; note = 2'-O-methyluridine-3'-phosphorothioate
  modified_base 20: mod_base = OTHER; note = 2'-O-methylguanosine-3'-phosphorothioate
  modified_base 21: mod_base = OTHER; note = 2'-O-methylcytidine-3'-phosphate
ttcggttggaattctttttgc

SEQ ID NO: 2504 - RNA, 21 nt, synthetic construct
  source 1..21: mol_type = other RNA
  modified_base 1: mod_base = OTHER; note = 2'-fluoroadenosine-3'-phosphorothioate
  modified_base 2: mod_base = OTHER; note = 2'-O-methylguanosine-3'-phosphorothioate
  modified_base 3: mod_base = OTHER; note = 2'-fluoroadenosine-3'-phosphate
  modified_base 4: mod_base = OTHER; note = 2'-O-methyladenosine-3'-phosphate
  modified_base 5: mod_base = OTHER; note = 2'-fluorocytidine-3'-phosphate
  modified_base 6: mod_base = OTHER; note = 2'-O-methyladenosine-3'-phosphate
  modified_base 7: mod_base = OTHER; note = 2'-fluoroadenosine-3'-phosphate
  modified_base 8: mod_base = OTHER; note = 2'-O-methyladenosine-3'-phosphate
  modified_base 9: mod_base = OTHER; note = 2'-fluoroadenosine-3'-phosphate
  modified_base 10: mod_base = OTHER; note = 2'-fluoroadenosine-3'-phosphate
  modified_base 11: mod_base = OTHER; note = 2'-fluorouridine-3'-phosphate
  modified_base 12: mod_base = OTHER; note = 2'-O-methyluridine-3'-phosphate
  modified_base 13: mod_base = OTHER; note = 2'-fluoroguanosine-3'-phosphate
  modified_base 14: mod_base = OTHER; note = 2'-O-methylguanosine-3'-phosphate
  modified_base 15: mod_base = OTHER; note = 2'-fluoroguanosine-3'-phosphate
  modified_base 16: mod_base = OTHER; note = 2'-O-methyluridine-3'-phosphate
  modified_base 17: mod_base = OTHER; note = 2'-fluorouridine-3'-phosphate
  modified_base 18: mod_base = OTHER; note = 2'-O-methyluridine-3'-phosphate
  modified_base 19: mod_base = OTHER; note = 2'-fluorouridine-3'-phosphate
  modified_base 20: mod_base = OTHER; note = 2'-O-methyladenosine-3'-phosphate
  modified_base 21: mod_base = OTHER; note = 2'-fluoroadenosine
agaacaaaaattgggttttaa

SEQ ID NO: 2505 - RNA, 21 nt, synthetic construct
  source 1..21: mol_type = other RNA
  modified_base 1: mod_base = OTHER; note = 2'-O-methyluridine-3'-phosphorothioate
  modified_base 2: mod_base = OTHER; note = 2'-O-methylcytidine-3'-phosphorothioate
  modified_base 3: mod_base = OTHER; note = 2'-O-methyluridine-3'-phosphate
  modified_base 4: mod_base = OTHER; note = 2'-O-methylcytidine-3'-phosphate
  modified_base 5: mod_base = OTHER; note = 2'-O-methylcytidine-3'-phosphate
  modified_base 6: mod_base = OTHER; note = 2'-O-methylcytidine-3'-phosphate
  modified_base 7: mod_base = OTHER; note = 2'-fluoroadenosine-3'-phosphate
  modified_base 8: mod_base = OTHER; note = 2'-O-methylcytidine-3'-phosphate
  modified_base 9: mod_base = OTHER; note = 2'-fluorocytidine-3'-phosphate
  modified_base 10: mod_base = OTHER; note = 2'-fluorouridine-3'-phosphate
  modified_base 11: mod_base = OTHER; note = 2'-fluorouridine-3'-phosphate
  modified_base 12: mod_base = OTHER; note = 2'-O-methyluridine-3'-phosphate
  modified_base 13: mod_base = OTHER; note = 2'-O-methyluridine-3'-phosphate
  modified_base 14: mod_base = OTHER; note = 2'-O-methylcytidine-3'-phosphate
  modified_base 15: mod_base = OTHER; note = 2'-O-methyluridine-3'-phosphate
  modified_base 16: mod_base = OTHER; note = 2'-O-methyluridine-3'-phosphate
  modified_base 17: mod_base = OTHER; note = 2'-O-methylcytidine-3'-phosphate
  modified_base 18: mod_base = OTHER; note = 2'-O-methyluridine-3'-phosphate
  modified_base 19: mod_base = OTHER; note = 2'-O-methyladenosine-3'-phosphate
  modified_base 20: mod_base = OTHER; note = 2'-O-methyladenosine-3'-phosphate
  modified_base 21: mod_base = OTHER; note = 2'-O-methyluridine
tctcccaccttttcttctaat

SEQ ID NO: 2506 - RNA, 21 nt, synthetic construct
  source 1..21: mol_type = other RNA
  modified_base 1: mod_base = OTHER; note = 2'-O-methyluridine-3'-phosphorothioate
  modified_base 2: mod_base = OTHER; note = 2'-O-methylguanosine-3'-phosphorothioate
  modified_base 3: mod_base = OTHER; note = 2'-O-methyluridine-3'-phosphate
  modified_base 4: mod_base = OTHER; note = 2'-O-methyluridine-3'-phosphate
  modified_base 5: mod_base = OTHER; note = 2'-O-methyluridine-3'-phosphate
  modified_base 6: mod_base = OTHER; note = 2'-O-methylguanosine-3'-phosphate
  modified_base 7: mod_base = OTHER; note = 2'-fluorocytidine-3'-phosphate
  modified_base 8: mod_base = OTHER; note = 2'-O-methyluridine-3'-phosphate
  modified_base 9: mod_base = OTHER; note = 2'-fluoroguanosine-3'-phosphate
  modified_base 10: mod_base = OTHER; note = 2'-fluorouridine-3'-phosphate
  modified_base 11: mod_base = OTHER; note = 2'-fluoroguanosine-3'-phosphate
  modified_base 12: mod_base = OTHER; note = 2'-O-methyluridine-3'-phosphate
  modified_base 13: mod_base = OTHER; note = 2'-O-methyladenosine-3'-phosphate
  modified_base 14: mod_base = OTHER; note = 2'-O-methyluridine-3'-phosphate
  modified_base 15: mod_base = OTHER; note = 2'-O-methylguanosine-3'-phosphate
  modified_base 16: mod_base = OTHER; note = 2'-O-methyladenosine-3'-phosphate
  modified_base 17: mod_base = OTHER; note = 2'-O-methyluridine-3'-phosphate
  modified_base 18: mod_base = OTHER; note = 2'-O-methylcytidine-3'-phosphate
  modified_base 19: mod_base = OTHER; note = 2'-O-methyladenosine-3'-phosphate
  modified_base 20: mod_base = OTHER; note = 2'-O-methyladenosine-3'-phosphate
  modified_base 21: mod_base = OTHER; note = 2'-O-methyladenosine
tgtttgctgtgtatgatcaaa

SEQ ID NO: 2507 - RNA, 21 nt, synthetic construct
  source 1..21: mol_type = other RNA
  modified_base 1: mod_base = OTHER; note = 2'-O-methyluridine-3'-phosphorothioate
  modified_base 2: mod_base = OTHER; note = 2'-O-methyluridine-3'-phosphorothioate
  modified_base 3: mod_base = OTHER; note = 2'-O-methylcytidine-3'-phosphate
  modified_base 4: mod_base = OTHER; note = 2'-O-methylcytidine-3'-phosphate
  modified_base 5: mod_base = OTHER; note = 2'-O-methylguanosine-3'-phosphate
  modified_base 6: mod_base = OTHER; note = 2'-O-methyluridine-3'-phosphate
  modified_base 7: mod_base = OTHER; note = 2'-fluoroadenosine-3'-phosphate
  modified_base 8: mod_base = OTHER; note = 2'-O-methyluridine-3'-phosphate
  modified_base 9: mod_base = OTHER; note = 2'-fluoroadenosine-3'-phosphate
  modified_base 10: mod_base = OTHER; note = 2'-fluorouridine-3'-phosphate
  modified_base 11: mod_base = OTHER; note = 2'-fluoroadenosine-3'-phosphate
  modified_base 12: mod_base = OTHER; note = 2'-O-methyluridine-3'-phosphate
  modified_base 13: mod_base = OTHER; note = 2'-O-methylguanosine-3'-phosphate
  modified_base 14: mod_base = OTHER; note = 2'-O-methylguanosine-3'-phosphate
  modified_base 15: mod_base = OTHER; note = 2'-O-methylcytidine-3'-phosphate
  modified_base 16: mod_base = OTHER; note = 2'-O-methyladenosine-3'-phosphate
  modified_base 17: mod_base = OTHER; note = 2'-O-methyluridine-3'-phosphate
  modified_base 18: mod_base = OTHER; note = 2'-O-methylguanosine-3'-phosphate
  modified_base 19: mod_base = OTHER; note = 2'-O-methylcytidine-3'-phosphate
  modified_base 20: mod_base = OTHER; note = 2'-O-methyladenosine-3'-phosphate
  modified_base 21: mod_base = OTHER; note = 2'-O-methyladenosine
ttccgtatatatggcatgcaa

SEQ ID NO: 2508 - RNA, 21 nt, synthetic construct
  source 1..21: mol_type = other RNA
  modified_base 1: mod_base = OTHER; note = 2'-O-methyladenosine-3'-phosphorothioate
  modified_base 2: mod_base = OTHER; note = 2'-O-methylcytidine-3'-phosphorothioate
  modified_base 3: mod_base = OTHER; note = 2'-O-methylcytidine-3'-phosphate
  modified_base 4: mod_base = OTHER; note = 2'-O-methyluridine-3'-phosphate
  modified_base 5: mod_base = OTHER; note = 2'-O-methylguanosine-3'-phosphate
  modified_base 6: mod_base = OTHER; note = 2'-O-methylcytidine-3'-phosphate
  modified_base 7: mod_base = OTHER; note = 2'-fluoroadenosine-3'-phosphate
  modified_base 8: mod_base = OTHER; note = 2'-O-methyladenosine-3'-phosphate
  modified_base 9: mod_base = OTHER; note = 2'-fluoroadenosine-3'-phosphate
  modified_base 10: mod_base = OTHER; note = 2'-fluoroadenosine-3'-phosphate
  modified_base 11: mod_base = OTHER; note = 2'-fluoroadenosine-3'-phosphate
  modified_base 12: mod_base = OTHER; note = 2'-O-methyluridine-3'-phosphate
  modified_base 13: mod_base = OTHER; note = 2'-O-methyluridine-3'-phosphate
  modified_base 14: mod_base = OTHER; note = 2'-O-methylguanosine-3'-phosphate
  modified_base 15: mod_base = OTHER; note = 2'-O-methyladenosine-3'-phosphate
  modified_base 16: mod_base = OTHER; note = 2'-O-methylguanosine-3'-phosphate
  modified_base 17: mod_base = OTHER; note = 2'-O-methylcytidine-3'-phosphate
  modified_base 18: mod_base = OTHER; note = 2'-O-methyladenosine-3'-phosphate
  modified_base 19: mod_base = OTHER; note = 2'-O-methyladenosine-3'-phosphate
  modified_base 20: mod_base = OTHER; note = 2'-O-methyluridine-3'-phosphate
  modified_base 21: mod_base = OTHER; note = 2'-O-methyladenosine
acctgcaaaaattgagcaata

SEQ ID NO: 2509 - RNA, 21 nt, synthetic construct
  source 1..21: mol_type = other RNA
  modified_base 1: mod_base = OTHER; note = 2'-O-methyladenosine-3'-phosphorothioate
  modified_base 2: mod_base = OTHER; note = 2'-O-methylcytidine-3'-phosphorothioate
  modified_base 3: mod_base = OTHER; note = 2'-O-methylcytidine-3'-phosphate
  modified_base 4: mod_base = OTHER; note = 2'-O-methyluridine-3'-phosphate
  modified_base 5: mod_base = OTHER; note = 2'-O-methylguanosine-3'-phosphate
  modified_base 6: mod_base = OTHER; note = 2'-O-methylcytidine-3'-phosphate
  modified_base 7: mod_base = OTHER; note = 2'-fluoroadenosine-3'-phosphate
  modified_base 8: mod_base = OTHER; note = 2'-O-methyladenosine-3'-phosphate
  modified_base 9: mod_base = OTHER; note = 2'-fluoroadenosine-3'-phosphate
  modified_base 10: mod_base = OTHER; note = 2'-fluoroadenosine-3'-phosphate
  modified_base 11: mod_base = OTHER; note = 2'-fluoroadenosine-3'-phosphate
  modified_base 12: mod_base = OTHER; note = 2'-O-methyluridine-3'-phosphate
  modified_base 13: mod_base = OTHER; note = 2'-O-methyluridine-3'-phosphate
  modified_base 14: mod_base = OTHER; note = 2'-O-methylguanosine-3'-phosphate
  modified_base 15: mod_base = OTHER; note = 2'-O-methyladenosine-3'-phosphate
  modified_base 16: mod_base = OTHER; note = 2'-O-methylguanosine-3'-phosphate
  modified_base 17: mod_base = OTHER; note = 2'-O-methylcytidine-3'-phosphate
  modified_base 18: mod_base = OTHER; note = 2'-O-methyladenosine-3'-phosphate
  modified_base 19: mod_base = OTHER; note = 2'-O-methyladenosine-3'-phosphate
  modified_base 20: mod_base = OTHER; note = 2'-O-methyluridine-3'-phosphate
  modified_base 21: mod_base = OTHER; note = 2'-O-methyladenosine
acctgcaaaaattgagcaata

SEQ ID NO: 2510 - RNA, 21 nt, synthetic construct
  source 1..21: mol_type = other RNA
  modified_base 1: mod_base = OTHER; note = 2'-O-methylcytidine-3'-phosphorothioate
  modified_base 2: mod_base = OTHER; note = 2'-O-methylcytidine-3'-phosphorothioate
  modified_base 3: mod_base = OTHER; note = 2'-O-methylcytidine-3'-phosphate
  modified_base 4: mod_base = OTHER; note = 2'-O-methyladenosine-3'-phosphate
  modified_base 5: mod_base = OTHER; note = 2'-O-methylcytidine-3'-phosphate
  modified_base 6: mod_base = OTHER; note = 2'-O-methylcytidine-3'-phosphate
  modified_base 7: mod_base = OTHER; note = 2'-fluorouridine-3'-phosphate
  modified_base 8: mod_base = OTHER; note = 2'-O-methyluridine-3'-phosphate
  modified_base 9: mod_base = OTHER; note = 2'-fluorouridine-3'-phosphate
  modified_base 10: mod_base = OTHER; note = 2'-fluorouridine-3'-phosphate
  modified_base 11: mod_base = OTHER; note = 2'-fluorocytidine-3'-phosphate
  modified_base 12: mod_base = OTHER; note = 2'-O-methyluridine-3'-phosphate
  modified_base 13: mod_base = OTHER; note = 2'-O-methyluridine-3'-phosphate
  modified_base 14: mod_base = OTHER; note = 2'-O-methylcytidine-3'-phosphate
  modified_base 15: mod_base = OTHER; note = 2'-O-methyluridine-3'-phosphate
  modified_base 16: mod_base = OTHER; note = 2'-O-methyladenosine-3'-phosphate
  modified_base 17: mod_base = OTHER; note = 2'-O-methyladenosine-3'-phosphate
  modified_base 18: mod_base = OTHER; note = 2'-O-methyluridine-3'-phosphate
  modified_base 19: mod_base = OTHER; note = 2'-O-methylguanosine-3'-phosphate
  modified_base 20: mod_base = OTHER; note = 2'-O-methyladenosine-3'-phosphate
  modified_base 21: mod_base = OTHER; note = 2'-O-methyladenosine
cccaccttttcttctaatgaa

SEQ ID NO: 2511 - RNA, 21 nt, synthetic construct
  source 1..21: mol_type = other RNA
  modified_base 1: mod_base = OTHER; note = 2'-O-methylcytidine-3'-phosphorothioate
  modified_base 2: mod_base = OTHER; note = 2'-O-methylcytidine-3'-phosphorothioate
  modified_base 3: mod_base = OTHER; note = 2'-O-methylcytidine-3'-phosphate
  modified_base 4: mod_base = OTHER; note = 2'-O-methyladenosine-3'-phosphate
  modified_base 5: mod_base = OTHER; note = 2'-O-methylcytidine-3'-phosphate
  modified_base 6: mod_base = OTHER; note = 2'-O-methylcytidine-3'-phosphate
  modified_base 7: mod_base = OTHER; note = 2'-fluorouridine-3'-phosphate
  modified_base 8: mod_base = OTHER; note = 2'-O-methyluridine-3'-phosphate
  modified_base 9: mod_base = OTHER; note = 2'-fluorouridine-3'-phosphate
  modified_base 10: mod_base = OTHER; note = 2'-fluorouridine-3'-phosphate
  modified_base 11: mod_base = OTHER; note = 2'-fluorocytidine-3'-phosphate
  modified_base 12: mod_base = OTHER; note = 2'-O-methyluridine-3'-phosphate
  modified_base 13: mod_base = OTHER; note = 2'-O-methyluridine-3'-phosphate
  modified_base 14: mod_base = OTHER; note = 2'-O-methylcytidine-3'-phosphate
  modified_base 15: mod_base = OTHER; note = 2'-O-methyluridine-3'-phosphate
  modified_base 16: mod_base = OTHER; note = 2'-O-methyladenosine-3'-phosphate
  modified_base 17: mod_base = OTHER; note = 2'-O-methyladenosine-3'-phosphate
  modified_base 18: mod_base = OTHER; note = 2'-O-methyluridine-3'-phosphate
  modified_base 19: mod_base = OTHER; note = 2'-O-methylguanosine-3'-phosphate
  modified_base 20: mod_base = OTHER; note = 2'-O-methyladenosine-3'-phosphate
  modified_base 21: mod_base = OTHER; note = 2'-O-methyladenosine
cccaccttttcttctaatgaa

SEQ ID NO: 2512 - RNA, 21 nt, synthetic construct
  source 1..21: mol_type = other RNA
  modified_base 1: mod_base = OTHER; note = 2'-O-methylcytidine-3'-phosphorothioate
  modified_base 2: mod_base = OTHER; note = 2'-O-methylcytidine-3'-phosphorothioate
  modified_base 3: mod_base = OTHER; note = 2'-O-methyladenosine-3'-phosphate
  modified_base 4: mod_base = OTHER; note = 2'-O-methylguanosine-3'-phosphate
  modified_base 5: mod_base = OTHER; note = 2'-O-methylcytidine-3'-phosphate
  modified_base 6: mod_base = OTHER; note = 2'-O-methyluridine-3'-phosphate
  modified_base 7: mod_base = OTHER; note = 2'-fluorouridine-3'-phosphate
  modified_base 8: mod_base = OTHER; note = 2'-O-methylguanosine-3'-phosphate
  modified_base 9: mod_base = OTHER; note = 2'-fluorouridine-3'-phosphate
  modified_base 10: mod_base = OTHER; note = 2'-fluorouridine-3'-phosphate
  modified_base 11: mod_base = OTHER; note = 2'-fluorouridine-3'-phosphate
  modified_base 12: mod_base = OTHER; note = 2'-O-methylguanosine-3'-phosphate
  modified_base 13: mod_base = OTHER; note = 2'-O-methyluridine-3'-phosphate
  modified_base 14: mod_base = OTHER; note = 2'-O-methylguanosine-3'-phosphate
  modified_base 15: mod_base = OTHER; note = 2'-O-methyladenosine-3'-phosphate
  modified_base 16: mod_base = OTHER; note = 2'-O-methyladenosine-3'-phosphate
  modified_base 17: mod_base = OTHER; note = 2'-O-methyladenosine-3'-phosphate
  modified_base 18: mod_base = OTHER; note = 2'-O-methylcytidine-3'-phosphate
  modified_base 19: mod_base = OTHER; note = 2'-O-methyladenosine-3'-phosphate
  modified_base 20: mod_base = OTHER; note = 2'-O-methyladenosine-3'-phosphate
  modified_base 21: mod_base = OTHER; note = 2'-O-methyladenosine
ccagcttgtttgtgaaacaaa

SEQ ID NO: 2513 - RNA, 21 nt, synthetic construct
  source 1..21: mol_type = other RNA
  modified_base 1: mod_base = OTHER; note = 2'-O-methylcytidine-3'-phosphorothioate
  modified_base 2: mod_base = OTHER; note = 2'-O-methylcytidine-3'-phosphorothioate
  modified_base 3: mod_base = OTHER; note = 2'-O-methyladenosine-3'-phosphate
  modified_base 4: mod_base = OTHER; note = 2'-O-methylguanosine-3'-phosphate
  modified_base 5: mod_base = OTHER; note = 2'-O-methylcytidine-3'-phosphate
  modified_base 6: mod_base = OTHER; note = 2'-O-methyluridine-3'-phosphate
  modified_base 7: mod_base = OTHER; note = 2'-fluorouridine-3'-phosphate
  modified_base 8: mod_base = OTHER; note = 2'-O-methylguanosine-3'-phosphate
  modified_base 9: mod_base = OTHER; note = 2'-fluorouridine-3'-phosphate
  modified_base 10: mod_base = OTHER; note = 2'-fluorouridine-3'-phosphate
  modified_base 11: mod_base = OTHER; note = 2'-fluorouridine-3'-phosphate
  modified_base 12: mod_base = OTHER; note = 2'-O-methylguanosine-3'-phosphate
  modified_base 13: mod_base = OTHER; note = 2'-O-methyluridine-3'-phosphate
  modified_base 14: mod_base = OTHER; note = 2'-O-methylguanosine-3'-phosphate
  modified_base 15: mod_base = OTHER; note = 2'-O-methyladenosine-3'-phosphate
  modified_base 16: mod_base = OTHER; note = 2'-O-methyladenosine-3'-phosphate
  modified_base 17: mod_base = OTHER; note = 2'-O-methyladenosine-3'-phosphate
  modified_base 18: mod_base = OTHER; note = 2'-O-methylcytidine-3'-phosphate
  modified_base 19: mod_base = OTHER; note = 2'-O-methyladenosine-3'-phosphate
  modified_base 20: mod_base = OTHER; note = 2'-O-methyladenosine-3'-phosphate
  modified_base 21: mod_base = OTHER; note = 2'-O-methyladenosine
ccagcttgtttgtgaaacaaa

SEQ ID NO: 2514 - RNA, 21 nt, synthetic construct
  source 1..21: mol_type = other RNA
  modified_base 1: mod_base = OTHER; note = 2'-O-methyladenosine-3'-phosphorothioate
  modified_base 2: mod_base = OTHER; note = 2'-O-methyladenosine-3'-phosphorothioate
  modified_base 3: mod_base = OTHER; note = 2'-O-methyladenosine-3'-phosphate
  modified_base 4: mod_base = OTHER; note = 2'-O-methyladenosine-3'-phosphate
  modified_base 5: mod_base = OTHER; note = 2'-O-methyladenosine-3'-phosphate
  modified_base 6: mod_base = OTHER; note = 2'-O-methyladenosine-3'-phosphate
  modified_base 7: mod_base = OTHER; note = 2'-fluoroguanosine-3'-phosphate
  modified_base 8: mod_base = OTHER; note = 2'-O-methyluridine-3'-phosphate
  modified_base 9: mod_base = OTHER; note = 2'-fluoroguanosine-3'-phosphate
  modified_base 10: mod_base = OTHER; note = 2'-fluorouridine-3'-phosphate
  modified_base 11: mod_base = OTHER; note = 2'-fluorouridine-3'-phosphate
  modified_base 12: mod_base = OTHER; note = 2'-O-methylcytidine-3'-phosphate
  modified_base 13: mod_base = OTHER; note = 2'-O-methylcytidine-3'-phosphate
  modified_base 14: mod_base = OTHER; note = 2'-O-methylcytidine-3'-phosphate
  modified_base 15: mod_base = OTHER; note = 2'-O-methyluridine-3'-phosphate
  modified_base 16: mod_base = OTHER; note = 2'-O-methyluridine-3'-phosphate
  modified_base 17: mod_base = OTHER; note = 2'-O-methyluridine-3'-phosphate
  modified_base 18: mod_base = OTHER; note = 2'-O-methyluridine-3'-phosphate
  modified_base 19: mod_base = OTHER; note = 2'-O-methylcytidine-3'-phosphate
  modified_base 20: mod_base = OTHER; note = 2'-O-methyladenosine-3'-phosphate
  modified_base 21: mod_base = OTHER; note = 2'-O-methyladenosine
aaaaaagtgttcccttttcaa

SEQ ID NO: 2515 - RNA, 21 nt, synthetic construct
  source 1..21: mol_type = other RNA
  modified_base 1: mod_base = OTHER; note = 2'-O-methyladenosine-3'-phosphorothioate
  modified_base 2: mod_base = OTHER; note = 2'-O-methyladenosine-3'-phosphorothioate
  modified_base 3: mod_base = OTHER; note = 2'-O-methyladenosine-3'-phosphate
  modified_base 4: mod_base = OTHER; note = 2'-O-methyladenosine-3'-phosphate
  modified_base 5: mod_base = OTHER; note = 2'-O-methyladenosine-3'-phosphate
  modified_base 6: mod_base = OTHER; note = 2'-O-methyladenosine-3'-phosphate
  modified_base 7: mod_base = OTHER; note = 2'-fluoroguanosine-3'-phosphate
  modified_base 8: mod_base = OTHER; note = 2'-O-methyluridine-3'-phosphate
  modified_base 9: mod_base = OTHER; note = 2'-fluoroguanosine-3'-phosphate
  modified_base 10: mod_base = OTHER; note = 2'-fluorouridine-3'-phosphate
  modified_base 11: mod_base = OTHER; note = 2'-fluorouridine-3'-phosphate
  modified_base 12: mod_base = OTHER; note = 2'-O-methylcytidine-3'-phosphate
  modified_base 13: mod_base = OTHER; note = 2'-O-methylcytidine-3'-phosphate
  modified_base 14: mod_base = OTHER; note = 2'-O-methylcytidine-3'-phosphate
  modified_base 15: mod_base = OTHER; note = 2'-O-methyluridine-3'-phosphate
  modified_base 16: mod_base = OTHER; note = 2'-O-methyluridine-3'-phosphate
  modified_base 17: mod_base = OTHER; note = 2'-O-methyluridine-3'-phosphate
  modified_base 18: mod_base = OTHER; note = 2'-O-methyluridine-3'-phosphate
  modified_base 19: mod_base = OTHER; note = 2'-O-methylcytidine-3'-phosphate
  modified_base 20: mod_base = OTHER; note = 2'-O-methyladenosine-3'-phosphate
  modified_base 21: mod_base = OTHER; note = 2'-O-methyladenosine
aaaaaagtgttcccttttcaa

SEQ ID NO: 2516 - RNA, 23 nt, synthetic construct
  source 1..23: mol_type = other RNA
  modified_base 1: mod_base = OTHER; note = 2'-O-methyluridine-3'-phosphorothioate
  modified_base 2: mod_base = OTHER; note = 2'-fluorouridine-3'-phosphorothioate
  modified_base 3: mod_base = OTHER; note = 2'-O-methyladenosine-3'-phosphate
  modified_base 4: mod_base = OTHER; note = 2'-fluoroadenosine-3'-phosphate
  modified_base 5: mod_base = OTHER; note = 2'-O-methyladenosine-3'-phosphate
  modified_base 6: mod_base = OTHER; note = 2'-fluoroadenosine-3'-phosphate
  modified_base 7: mod_base = OTHER; note = 2'-O-methylcytidine-3'-phosphate
  modified_base 8: mod_base = OTHER; note = 2'-fluorocytidine-3'-phosphate
  modified_base 9: mod_base = OTHER; note = 2'-O-methylcytidine-3'-phosphate
  modified_base 10: mod_base = OTHER; note = 2'-fluoroadenosine-3'-phosphate
  modified_base 11: mod_base = OTHER; note = 2'-O-methyladenosine-3'-phosphate
  modified_base 12: mod_base = OTHER; note = 2'-O-methyluridine-3'-phosphate
  modified_base 13: mod_base = OTHER; note = 2'-O-methyluridine-3'-phosphate
  modified_base 14: mod_base = OTHER; note = 2'-fluorouridine-3'-phosphate
  modified_base 15: mod_base = OTHER; note = 2'-O-methyluridine-3'-phosphate
  modified_base 16: mod_base = OTHER; note = 2'-fluorouridine-3'-phosphate
  modified_base 17: mod_base = OTHER; note = 2'-O-methylguanosine-3'-phosphate
  modified_base 18: mod_base = OTHER; note = 2'-fluorouridine-3'-phosphate
  modified_base 19: mod_base = OTHER; note = 2'-O-methyluridine-3'-phosphate
  modified_base 20: mod_base = OTHER; note = 2'-fluorocytidine-3'-phosphate
  modified_base 21: mod_base = OTHER; note = 2'-O-methyluridine-3'-phosphorothioate
  modified_base 22: mod_base = OTHER; note = 2'-O-methylcytidine-3'-phosphorothioate
  modified_base 23: mod_base = OTHER; note = 2'-O-methyladenosine
ttaaaacccaatttttgttctca

SEQ ID NO: 2517 - RNA, 23 nt, synthetic construct
  source 1..23: mol_type = other RNA
  modified_base 1: mod_base = OTHER; note = 2'-O-methyladenosine-3'-phosphorothioate
  modified_base 2: mod_base = OTHER; note = 2'-fluorouridine-3'-phosphorothioate
  modified_base 3: mod_base = OTHER; note = 2'-O-methyluridine-3'-phosphate
  modified_base 4: mod_base = OTHER; note = 2'-O-methyladenosine-3'-phosphate
  modified_base 5: mod_base = OTHER; note = 2'-O-methylguanosine-3'-phosphate
  modified_base 6: mod_base = OTHER; note = 2'-fluoroadenosine-3'-phosphate
  modified_base 7: mod_base = OTHER; note = 2'-O-methyladenosine-3'-phosphate
  modified_base 8: mod_base = OTHER; note = 2'-O-methylguanosine-3'-phosphate
  modified_base 9: mod_base = OTHER; note = 2'-O-methyladenosine-3'-phosphate
  modified_base 10: mod_base = OTHER; note = 2'-O-methyladenosine-3'-phosphate
  modified_base 11: mod_base = OTHER; note = 2'-O-methyladenosine-3'-phosphate
  modified_base 12: mod_base = OTHER; note = 2'-O-methyladenosine-3'-phosphate
  modified_base 13: mod_base = OTHER; note = 2'-O-methylguanosine-3'-phosphate
  modified_base 14: mod_base = OTHER; note = 2'-fluoroguanosine-3'-phosphate
  modified_base 15: mod_base = OTHER; note = 2'-O-methyluridine-3'-phosphate
  modified_base 16: mod_base = OTHER; note = 2'-fluoroguanosine-3'-phosphate
  modified_base 17: mod_base = OTHER; note = 2'-O-methylguanosine-3'-phosphate
  modified_base 18: mod_base = OTHER; note = 2'-O-methylguanosine-3'-phosphate
  modified_base 19: mod_base = OTHER; note = 2'-O-methyladenosine-3'-phosphate
  modified_base 20: mod_base = OTHER; note = 2'-O-methylguanosine-3'-phosphate
  modified_base 21: mod_base = OTHER; note = 2'-O-methyladenosine-3'-phosphorothioate
  modified_base 22: mod_base = OTHER; note = 2'-O-methylcytidine-3'-phosphorothioate
  modified_base 23: mod_base = OTHER; note = 2'-O-methyluridine
attagaagaaaaggtgggagact

SEQ ID NO: 2518 - RNA, 23 nt, synthetic construct
  source 1..23: mol_type = other RNA
  modified_base 1: mod_base = OTHER; note = 2'-O-methyluridine-3'-phosphorothioate
  modified_base 2: mod_base = OTHER; note = 2'-fluorouridine-3'-phosphorothioate
  modified_base 3: mod_base = OTHER; note = 2'-O-methyluridine-3'-phosphate
  modified_base 4: mod_base = OTHER; note = 2'-O-methylguanosine-3'-phosphate
  modified_base 5: mod_base = OTHER; note = 2'-O-methyladenosine-3'-phosphate
  modified_base 6: mod_base = OTHER; note = 2'-fluorouridine-3'-phosphate
  modified_base 7: mod_base = OTHER; note = 2'-O-methylcytidine-3'-phosphate
  modified_base 8: mod_base = OTHER; note = 2'-fluoroadenosine-3'-phosphate
  modified_base 9: mod_base = OTHER; note = 2'-fluorouridine-3'-phosphate
  modified_base 10: mod_base = OTHER; note = 2'-O-methyladenosine-3'-phosphate
  modified_base 11: mod_base = OTHER; note = 2'-O-methylcytidine-3'-phosphate
  modified_base 12: mod_base = OTHER; note = 2'-O-methyladenosine-3'-phosphate
  modified_base 13: mod_base = OTHER; note = 2'-O-methylcytidine-3'-phosphate
  modified_base 14: mod_base = OTHER; note = 2'-fluoroadenosine-3'-phosphate
  modified_base 15: mod_base = OTHER; note = 2'-O-methylguanosine-3'-phosphate
  modified_base 16: mod_base = OTHER; note = 2'-fluorocytidine-3'-phosphate
  modified_base 17: mod_base = OTHER; note = 2'-O-methyladenosine-3'-phosphate
  modified_base 18: mod_base = OTHER; note = 2'-O-methyladenosine-3'-phosphate
  modified_base 19: mod_base = OTHER; note = 2'-O-methyladenosine-3'-phosphate
  modified_base 20: mod_base = OTHER; note = 2'-O-methylcytidine-3'-phosphate
  modified_base 21: mod_base = OTHER; note = 2'-O-methyladenosine-3'-phosphorothioate
  modified_base 22: mod_base = OTHER; note = 2'-O-methylguanosine-3'-phosphorothioate
  modified_base 23: mod_base = OTHER; note = 2'-O-methylguanosine
tttgatcatacacagcaaacagg

SEQ ID NO: 2519 - RNA, 23 nt, synthetic construct
  source 1..23: mol_type = other RNA
  modified_base 1: mod_base = OTHER; note = 2'-O-methyluridine-3'-phosphorothioate
  modified_base 2: mod_base = OTHER; note = 2'-fluorouridine-3'-phosphorothioate
  modified_base 3: mod_base = OTHER; note = 2'-O-methylguanosine-3'-phosphate
  modified_base 4: mod_base = OTHER; note = 2'-O-methylcytidine-3'-phosphate
  modified_base 5: mod_base = OTHER; note = 2'-O-methyladenosine-3'-phosphate
  modified_base 6: mod_base = OTHER; note = 2'-fluorouridine-3'-phosphate
  modified_base 7: mod_base = OTHER; note = 2'-O-methylguanosine-3'-phosphate
  modified_base 8: mod_base = OTHER; note = 2'-fluorocytidine-3'-phosphate
  modified_base 9: mod_base = OTHER; note = 2'-fluorocytidine-3'-phosphate
  modified_base 10: mod_base = OTHER; note = 2'-O-methyladenosine-3'-phosphate
  modified_base 11: mod_base = OTHER; note = 2'-O-methyluridine-3'-phosphate
  modified_base 12: mod_base = OTHER; note = 2'-O-methyladenosine-3'-phosphate
  modified_base 13: mod_base = OTHER; note = 2'-O-methyluridine-3'-phosphate
  modified_base 14: mod_base = OTHER; note = 2'-fluoroadenosine-3'-phosphate
  modified_base 15: mod_base = OTHER; note = 2'-O-methyluridine-3'-phosphate
  modified_base 16: mod_base = OTHER; note = 2'-fluoroadenosine-3'-phosphate
  modified_base 17: mod_base = OTHER; note = 2'-O-methylcytidine-3'-phosphate
  modified_base 18: mod_base = OTHER; note = 2'-O-methylguanosine-3'-phosphate
  modified_base 19: mod_base = OTHER; note = 2'-O-methylguanosine-3'-phosphate
  modified_base 20: mod_base = OTHER; note = 2'-O-methyladenosine-3'-phosphate
  modified_base 21: mod_base = OTHER; note = 2'-O-methyladenosine-3'-phosphorothioate
  modified_base 22: mod_base = OTHER; note = 2'-O-methylguanosine-3'-phosphorothioate
  modified_base 23: mod_base = OTHER; note = 2'-O-methylcytidine
ttgcatgccatatatacggaagc

SEQ ID NO: 2520 - RNA, 23 nt, synthetic construct
  source 1..23: mol_type = other RNA
  modified_base 1: mod_base = OTHER; note = 2'-O-methyluridine-3'-phosphorothioate
  modified_base 2: mod_base = OTHER; note = 2'-fluoroadenosine-3'-phosphorothioate
  modified_base 3: mod_base = OTHER; note = 2'-O-methyluridine-3'-phosphate
  modified_base 4: mod_base = OTHER; note = 2'-O-methyluridine-3'-phosphate
  modified_base 5: mod_base = OTHER; note = 2'-O-methylguanosine-3'-phosphate
  modified_base 6: mod_base = OTHER; note = 2'-fluorocytidine-3'-phosphate
  modified_base 7: mod_base = OTHER; note = 2'-O-methyluridine-3'-phosphate
  modified_base 8: mod_base = OTHER; note = 2'-fluorocytidine-3'-phosphate
  modified_base 9: mod_base = OTHER; note = 2'-fluoroadenosine-3'-phosphate
  modified_base 10: mod_base = OTHER; note = 2'-O-methyladenosine-3'-phosphate
  modified_base 11: mod_base = OTHER; note = 2'-O-methyluridine-3'-phosphate
  modified_base 12: mod_base = OTHER; note = 2'-O-methyluridine-3'-phosphate
  modified_base 13: mod_base = OTHER; note = 2'-O-methyluridine-3'-phosphate
  modified_base 14: mod_base = OTHER; note = 2'-fluorouridine-3'-phosphate
  modified_base 15: mod_base = OTHER; note = 2'-O-methyluridine-3'-phosphate
  modified_base 16: mod_base = OTHER; note = 2'-fluoroguanosine-3'-phosphate
  modified_base 17: mod_base = OTHER; note = 2'-O-methylcytidine-3'-phosphate
  modified_base 18: mod_base = OTHER; note = 2'-O-methyladenosine-3'-phosphate
  modified_base 19: mod_base = OTHER; note = 2'-O-methylguanosine-3'-phosphate
  modified_base 20: mod_base = OTHER; note = 2'-O-methylguanosine-3'-phosphate
  modified_base 21: mod_base = OTHER; note = 2'-O-methyluridine-3'-phosphorothioate
  modified_base 22: mod_base = OTHER; note = 2'-O-methyluridine-3'-phosphorothioate
  modified_base 23: mod_base = OTHER; note = 2'-O-methylcytidine
tattgctcaatttttgcaggttc

SEQ ID NO: 2521 - RNA, 23 nt, synthetic construct
  source 1..23: mol_type = other RNA
  modified_base 1: mod_base = OTHER; note = 2'-O-methyluridine-3'-phosphorothioate
  modified_base 2: mod_base = OTHER; note = 2'-fluoroadenosine-3'-phosphorothioate
  modified_base 3: mod_base = OTHER; note = 2'-O-methyluridine-3'-phosphate
  modified_base 4: mod_base = OTHER; note = 2'-O-methyluridine-3'-phosphate
  modified_base 5: mod_base = OTHER; note = 2'-O-methylguanosine-3'-phosphate
  modified_base 6: mod_base = OTHER; note = 2'-fluorocytidine-3'-phosphate
  modified_base 7: mod_base = OTHER; note = 2'-O-methyluridine-3'-phosphate
  modified_base 8: mod_base = OTHER; note = 2'-O-methylcytidine-3'-phosphate
  modified_base 9: mod_base = OTHER; note = 2'-O-methyladenosine-3'-phosphate
  modified_base 10: mod_base = OTHER; note = 2'-O-methyladenosine-3'-phosphate
  modified_base 11: mod_base = OTHER; note = 2'-O-methyluridine-3'-phosphate
  modified_base 12: mod_base = OTHER; note = 2'-O-methyluridine-3'-phosphate
  modified_base 13: mod_base = OTHER; note = 2'-O-methyluridine-3'-phosphate
  modified_base 14: mod_base = OTHER; note = 2'-fluorouridine-3'-phosphate
  modified_base 15: mod_base = OTHER; note = 2'-O-methyluridine-3'-phosphate
  modified_base 16: mod_base = OTHER; note = 2'-fluoroguanosine-3'-phosphate
  modified_base 17: mod_base = OTHER; note = 2'-O-methylcytidine-3'-phosphate
  modified_base 18: mod_base = OTHER; note = 2'-O-methyladenosine-3'-phosphate
  modified_base 19: mod_base = OTHER; note = 2'-O-methylguanosine-3'-phosphate
  modified_base 20: mod_base = OTHER; note = 2'-O-methylguanosine-3'-phosphate
  modified_base 21: mod_base = OTHER; note = 2'-O-methyluridine-3'-phosphorothioate
  modified_base 22: mod_base = OTHER; note = 2'-O-methyluridine-3'-phosphorothioate
  modified_base 23: mod_base = OTHER; note = 2'-O-methylcytidine
tattgctcaatttttgcaggttc

SEQ ID NO: 2522 - RNA, 23 nt, synthetic construct
  source 1..23: mol_type = other RNA
  modified_base 1: mod_base = OTHER; note = 2'-O-methyluridine-3'-phosphorothioate
  modified_base 2: mod_base = OTHER; note = 2'-fluorouridine-3'-phosphorothioate
  modified_base 3: mod_base = OTHER; note = 2'-O-methylcytidine-3'-phosphate
  modified_base 4: mod_base = OTHER; note = 2'-O-methyladenosine-3'-phosphate
  modified_base 5: mod_base = OTHER; note = 2'-O-methyluridine-3'-phosphate
  modified_base 6: mod_base = OTHER; note = 2'-fluorouridine-3'-phosphate
  modified_base 7: mod_base = OTHER; note = 2'-O-methyladenosine-3'-phosphate
  modified_base 8: mod_base = OTHER; note = 2'-fluoroguanosine-3'-phosphate
  modified_base 9: mod_base = OTHER; note = 2'-fluoroadenosine-3'-phosphate
  modified_base 10: mod_base = OTHER; note = 2'-O-methyladenosine-3'-phosphate
  modified_base 11: mod_base = OTHER; note = 2'-O-methylguanosine-3'-phosphate
  modified_base 12: mod_base = OTHER; note = 2'-O-methyladenosine-3'-phosphate
  modified_base 13: mod_base = OTHER; note = 2'-O-methyladenosine-3'-phosphate
  modified_base 14: mod_base = OTHER; note = 2'-fluoroadenosine-3'-phosphate
  modified_base 15: mod_base = OTHER; note = 2'-O-methyladenosine-3'-phosphate
  modified_base 16: mod_base = OTHER; note = 2'-fluoroguanosine-3'-phosphate
  modified_base 17: mod_base = OTHER; note = 2'-O-methylguanosine-3'-phosphate
  modified_base 18: mod_base = OTHER; note = 2'-O-methyluridine-3'-phosphate
  modified_base 19: mod_base = OTHER; note = 2'-O-methylguanosine-3'-phosphate
  modified_base 20: mod_base = OTHER; note = 2'-O-methylguanosine-3'-phosphate
  modified_base 21: mod_base = OTHER; note = 2'-O-methylguanosine-3'-phosphorothioate
  modified_base 22: mod_base = OTHER; note = 2'-O-methyladenosine-3'-phosphorothioate
  modified_base 23: mod_base = OTHER; note = 2'-O-methylguanosine
ttcattagaagaaaaggtgggag

SEQ ID NO: 2523 - RNA, 23 nt, synthetic construct
  source 1..23: mol_type = other RNA
  modified_base 1: mod_base = OTHER; note = 2'-O-methyluridine-3'-phosphorothioate
  modified_base 2: mod_base = OTHER; note = 2'-fluorouridine-3'-phosphorothioate
  modified_base 3: mod_base = OTHER; note = 2'-O-methylcytidine-3'-phosphate
  modified_base 4: mod_base = OTHER; note = 2'-O-methyladenosine-3'-phosphate
  modified_base 5: mod_base = OTHER; note = 2'-O-methyluridine-3'-phosphate
  modified_base 6: mod_base = OTHER; note = 2'-fluorouridine-3'-phosphate
  modified_base 7: mod_base = OTHER; note = 2'-O-methyladenosine-3'-phosphate
  modified_base 8: mod_base = OTHER; note = 2'-O-methylguanosine-3'-phosphate
  modified_base 9: mod_base = OTHER; note = 2'-O-methyladenosine-3'-phosphate
  modified_base 10: mod_base = OTHER; note = 2'-O-methyladenosine-3'-phosphate
  modified_base 11: mod_base = OTHER; note = 2'-O-methylguanosine-3'-phosphate
  modified_base 12: mod_base = OTHER; note = 2'-O-methyladenosine-3'-phosphate
  modified_base 13: mod_base = OTHER; note = 2'-O-methyladenosine-3'-phosphate
  modified_base 14: mod_base = OTHER; note = 2'-fluoroadenosine-3'-phosphate
  modified_base 15: mod_base = OTHER; note = 2'-O-methyladenosine-3'-phosphate
  modified_base 16: mod_base = OTHER; note = 2'-fluoroguanosine-3'-phosphate
  modified_base 17: mod_base = OTHER; note = 2'-O-methylguanosine-3'-phosphate
  modified_base 18: mod_base = OTHER; note = 2'-O-methyluridine-3'-phosphate
  modified_base 19: mod_base = OTHER; note = 2'-O-methylguanosine-3'-phosphate
  modified_base 20: mod_base = OTHER; note = 2'-O-methylguanosine-3'-phosphate
  modified_base 21: mod_base = OTHER; note = 2'-O-methylguanosine-3'-phosphorothioate
  modified_base 22: mod_base = OTHER; note = 2'-O-methyladenosine-3'-phosphorothioate
  modified_base 23: mod_base = OTHER; note = 2'-O-methylguanosine
ttcattagaagaaaaggtgggag

SEQ ID NO: 2524 - RNA, 23 nt, synthetic construct
  source 1..23: mol_type = other RNA
  modified_base 1: mod_base = OTHER; note = 2'-O-methyluridine-3'-phosphorothioate
  modified_base 2: mod_base = OTHER; note = 2'-fluorouridine-3'-phosphorothioate
  modified_base 3: mod_base = OTHER; note = 2'-O-methyluridine-3'-phosphate
  modified_base 4: mod_base = OTHER; note = 2'-O-methylguanosine-3'-phosphate
  modified_base 5: mod_base = OTHER; note = 2'-O-methyluridine-3'-phosphate
  modified_base 6: mod_base = OTHER; note = 2'-fluorouridine-3'-phosphate
  modified_base 7: mod_base = OTHER; note = 2'-O-methyluridine-3'-phosphate
  modified_base 8: mod_base = OTHER; note = 2'-fluorocytidine-3'-phosphate
  modified_base 9: mod_base = OTHER; note = 2'-fluoroadenosine-3'-phosphate
  modified_base 10: mod_base = OTHER; note = 2'-O-methylcytidine-3'-phosphate
  modified_base 11: mod_base = OTHER; note = 2'-O-methyladenosine-3'-phosphate
  modified_base 12: mod_base = OTHER; note = 2'-O-methyladenosine-3'-phosphate
  modified_base 13: mod_base = OTHER; note = 2'-O-methyladenosine-3'-phosphate
  modified_base 14: mod_base = OTHER; note = 2'-fluorocytidine-3'-phosphate
  modified_base 15: mod_base = OTHER; note = 2'-O-methyladenosine-3'-phosphate
  modified_base 16: mod_base = OTHER; note = 2'-fluoroadenosine-3'-phosphate
  modified_base 17: mod_base = OTHER; note = 2'-O-methylguanosine-3'-phosphate
  modified_base 18: mod_base = OTHER; note = 2'-O-methylcytidine-3'-phosphate
  modified_base 19: mod_base = OTHER; note = 2'-O-methyluridine-3'-phosphate
  modified_base 20: mod_base = OTHER; note = 2'-O-methylguanosine-3'-phosphate
  modified_base 21: mod_base = OTHER; note = 2'-O-methylguanosine-3'-phosphorothioate
  modified_base 22: mod_base = OTHER; note = 2'-O-methyluridine-3'-phosphorothioate
  modified_base 23: mod_base = OTHER; note = 2'-O-methylcytidine
tttgtttcacaaacaagctggtc

SEQ ID NO: 2525 - RNA, 23 nt, synthetic construct
  source 1..23: mol_type = other RNA
  modified_base 1: mod_base = OTHER; note = 2'-O-methyluridine-3'-phosphorothioate
  modified_base 2: mod_base = OTHER; note = 2'-fluorouridine-3'-phosphorothioate
  modified_base 3: mod_base = OTHER; note = 2'-O-methyluridine-3'-phosphate
  modified_base 4: mod_base = OTHER; note = 2'-O-methylguanosine-3'-phosphate
  modified_base 5: mod_base = OTHER; note = 2'-O-methyluridine-3'-phosphate
  modified_base 6: mod_base = OTHER; note = 2'-fluorouridine-3'-phosphate
  modified_base 7: mod_base = OTHER; note = 2'-O-methyluridine-3'-phosphate
  modified_base 8: mod_base = OTHER; note = 2'-O-methylcytidine-3'-phosphate
  modified_base 9: mod_base = OTHER; note = 2'-O-methyladenosine-3'-phosphate
  modified_base 10: mod_base = OTHER; note = 2'-O-methylcytidine-3'-phosphate
  modified_base 11: mod_base = OTHER; note = 2'-O-methyladenosine-3'-phosphate
  modified_base 12: mod_base = OTHER; note = 2'-O-methyladenosine-3'-phosphate
  modified_base 13: mod_base = OTHER; note = 2'-O-methyladenosine-3'-phosphate
  modified_base 14: mod_base = OTHER; note = 2'-fluorocytidine-3'-phosphate
  modified_base 15: mod_base = OTHER; note = 2'-O-methyladenosine-3'-phosphate
  modified_base 16: mod_base = OTHER; note = 2'-fluoroadenosine-3'-phosphate
  modified_base 17: mod_base = OTHER; note = 2'-O-methylguanosine-3'-phosphate
  modified_base 18: mod_base = OTHER; note = 2'-O-methylcytidine-3'-phosphate
  modified_base 19: mod_base = OTHER; note = 2'-O-methyluridine-3'-phosphate
  modified_base 20: mod_base = OTHER; note = 2'-O-methylguanosine-3'-phosphate
  modified_base 21: mod_base = OTHER; note = 2'-O-methylguanosine-3'-phosphorothioate
  modified_base 22: mod_base = OTHER; note = 2'-O-methyluridine-3'-phosphorothioate
  modified_base 23: mod_base = OTHER; note = 2'-O-methylcytidine
tttgtttcacaaacaagctggtc

SEQ ID NO: 2526 - RNA, 23 nt, synthetic construct
  source 1..23: mol_type = other RNA
  modified_base 1: mod_base = OTHER; note = 2'-O-methyluridine-3'-phosphorothioate
  modified_base 2: mod_base = OTHER; note = 2'-fluorouridine-3'-phosphorothioate
  modified_base 3: mod_base = OTHER; note = 2'-O-methylguanosine-3'-phosphate
  modified_base 4: mod_base = OTHER; note = 2'-O-methyladenosine-3'-phosphate
  modified_base 5: mod_base = OTHER; note = 2'-O-methyladenosine-3'-phosphate
  modified_base 6: mod_base = OTHER; note = 2'-fluoroadenosine-3'-phosphate
  modified_base 7: mod_base = OTHER; note = 2'-O-methyladenosine-3'-phosphate
  modified_base 8: mod_base = OTHER; note = 2'-O-methylguanosine-3'-phosphate
  modified_base 9: mod_base = OTHER; note = 2'-O-methylguanosine-3'-phosphate
  modified_base 10: mod_base = OTHER; note = 2'-O-methylguanosine-3'-phosphate
  modified_base 11: mod_base = OTHER; note = 2'-O-methyladenosine-3'-phosphate
  modified_base 12: mod_base = OTHER; note = 2'-O-methyladenosine-3'-phosphate
  modified_base 13: mod_base = OTHER; note = 2'-O-methylcytidine-3'-phosphate
  modified_base 14: mod_base = OTHER; note = 2'-fluoroadenosine-3'-phosphate
  modified_base 15: mod_base = OTHER; note = 2'-O-methylcytidine-3'-phosphate
  modified_base 16: mod_base = OTHER; note = 2'-fluorouridine-3'-phosphate
  modified_base 17: mod_base = OTHER; note = 2'-O-methyluridine-3'-phosphate
  modified_base 18: mod_base = OTHER; note = 2'-O-methyluridine-3'-phosphate
  modified_base 19: mod_base = OTHER; note = 2'-O-methyluridine-3'-phosphate
  modified_base 20: mod_base = OTHER; note = 2'-O-methyluridine-3'-phosphate
  modified_base 21: mod_base = OTHER; note = 2'-O-methyluridine-3'-phosphorothioate
  modified_base 22: mod_base = OTHER; note = 2'-O-methylguanosine-3'-phosphorothioate
  modified_base 23: mod_base = OTHER; note = 2'-O-methyluridine
ttgaaaagggaacacttttttgt

SEQ ID NO: 2527 - RNA, 23 nt, synthetic construct
  source 1..23: mol_type = other RNA
  modified_base 1: mod_base = OTHER; note = 2'-O-methyluridine-3'-phosphorothioate
  modified_base 2: mod_base = OTHER; note = 2'-fluorouridine-3'-phosphorothioate
  modified_base 3: mod_base = OTHER; note = 2'-O-methylguanosine-3'-phosphate
  modified_base 4: mod_base = OTHER; note = 2'-O-methyladenosine-3'-phosphate
  modified_base 5: mod_base = OTHER; note = 2'-O-methyladenosine-3'-phosphate
  modified_base 6: mod_base = OTHER; note = 2'-fluoroadenosine-3'-phosphate
  modified_base 7: mod_base = OTHER; note = 2'-O-methyladenosine-3'-phosphate
  modified_base 8: mod_base = OTHER; note = 2'-fluoroguanosine-3'-phosphate
  modified_base 9: mod_base = OTHER; note = 2'-fluoroguanosine-3'-phosphate
  modified_base 10: mod_base = OTHER; note = 2'-O-methylguanosine-3'-phosphate
  modified_base 11: mod_base = OTHER; note = 2'-O-methyladenosine-3'-phosphate
  modified_base 12: mod_base = OTHER; note = 2'-O-methyladenosine-3'-phosphate
  modified_base 13: mod_base = OTHER; note = 2'-O-methylcytidine-3'-phosphate
  modified_base 14: mod_base = OTHER; note = 2'-fluoroadenosine-3'-phosphate
  modified_base 15: mod_base = OTHER; note = 2'-O-methylcytidine-3'-phosphate
  modified_base 16: mod_base = OTHER; note = 2'-fluorouridine-3'-phosphate
  modified_base 17: mod_base = OTHER; note = 2'-O-methyluridine-3'-phosphate
  modified_base 18: mod_base = OTHER; note = 2'-O-methyluridine-3'-phosphate
  modified_base 19: mod_base = OTHER; note = 2'-O-methyluridine-3'-phosphate
  modified_base 20: mod_base = OTHER; note = 2'-O-methyluridine-3'-phosphate
  modified_base 21: mod_base = OTHER; note = 2'-O-methyluridine-3'-phosphorothioate
  modified_base 22: mod_base = OTHER; note = 2'-O-methylguanosine-3'-phosphorothioate
  modified_base 23: mod_base = OTHER; note = 2'-O-methyluridine
ttgaaaagggaacacttttttgt

SEQ ID NO: 2528 - RNA, 21 nt, synthetic construct
  source 1..21: mol_type = other RNA
  modified_base 1: mod_base = OTHER; note = 2'-O-methylguanosine-3'-phosphorothioate
  modified_base 2: mod_base = OTHER; note = 2'-O-methyluridine-3'-phosphorothioate
  modified_base 3: mod_base = OTHER; note = 2'-O-methylcytidine-3'-phosphate
  modified_base 4: mod_base = OTHER; note = 2'-O-methyladenosine-3'-phosphate
  modified_base 5: mod_base = OTHER; note = 2'-O-methyluridine-3'-phosphate
  modified_base 6: mod_base = OTHER; note = 2'-O-methylcytidine-3'-phosphate
  modified_base 7: mod_base = OTHER; note = 2'-fluorocytidine-3'-phosphate
  modified_base 8: mod_base = OTHER; note = 2'-O-methyladenosine-3'-phosphate
  modified_base 9: mod_base = OTHER; note = 2'-fluorocytidine-3'-phosphate
  modified_base 10: mod_base = OTHER; note = 2'-fluoroadenosine-3'-phosphate
  modified_base 11: mod_base = OTHER; note = 2'-fluoroadenosine-3'-phosphate
  modified_base 12: mod_base = OTHER; note = 2'-O-methyluridine-3'-phosphate
  modified_base 13: mod_base = OTHER; note = 2'-O-methylguanosine-3'-phosphate
  modified_base 14: mod_base = OTHER; note = 2'-O-methyladenosine-3'-phosphate
  modified_base 15: mod_base = OTHER; note = 2'-O-methylguanosine-3'-phosphate
  modified_base 16: mod_base = OTHER; note = 2'-O-methyladenosine-3'-phosphate
  modified_base 17: mod_base = OTHER; note = 2'-O-methylguanosine-3'-phosphate
  modified_base 18: mod_base = OTHER; note = 2'-O-methyluridine-3'-phosphate
  modified_base 19: mod_base = OTHER; note = 2'-O-methyladenosine-3'-phosphate
  modified_base 20: mod_base = OTHER; note = 2'-O-methylcytidine-3'-phosphate
  modified_base 21: mod_base = OTHER; note = 2'-O-methyladenosine
gtcatccacaatgagagtaca

SEQ ID NO: 2529 - RNA, 23 nt, synthetic construct
  source 1..23: mol_type = other RNA
  modified_base 1: mod_base = OTHER; note = 2'-O-methyluridine-3'-phosphorothioate
  modified_base 2: mod_base = OTHER; note = 2'-fluoroguanosine-3'-phosphorothioate
  modified_base 3: mod_base = OTHER; note = 2'-O-methyluridine-3'-phosphate
  modified_base 4: mod_base = OTHER; note = 2'-O-methyladenosine-3'-phosphate
  modified_base 5: mod_base = OTHER; note = 2'-O-methylcytidine-3'-phosphate
  modified_base 6: mod_base = OTHER; note = Thymine glycol nucleic acid-2'-phosphate
  modified_base 7: mod_base = OTHER; note = 2'-O-methylcytidine-3'-phosphate
  modified_base 8: mod_base = OTHER; note = 2'-O-methyluridine-3'-phosphate
  modified_base 9: mod_base = OTHER; note = 2'-O-methylcytidine-3'-phosphate
  modified_base 10: mod_base = OTHER; note = 2'-O-methyladenosine-3'-phosphate
  modified_base 11: mod_base = OTHER; note = 2'-O-methyluridine-3'-phosphate
  modified_base 12: mod_base = OTHER; note = 2'-O-methyluridine-3'-phosphate
  modified_base 13: mod_base = OTHER; note = 2'-O-methylguanosine-3'-phosphate
  modified_base 14: mod_base = OTHER; note = 2'-fluorouridine-3'-phosphate
  modified_base 15: mod_base = OTHER; note = 2'-O-methylguanosine-3'-phosphate
  modified_base 16: mod_base = OTHER; note = 2'-fluoroguanosine-3'-phosphate
  modified_base 17: mod_base = OTHER; note = 2'-O-methyladenosine-3'-phosphate
  modified_base 18: mod_base = OTHER; note = 2'-O-methyluridine-3'-phosphate
  modified_base 19: mod_base = OTHER; note = 2'-O-methylguanosine-3'-phosphate
  modified_base 20: mod_base = OTHER; note = 2'-O-methyladenosine-3'-phosphate
  modified_base 21: mod_base = OTHER; note = 2'-O-methylcytidine-3'-phosphorothioate
  modified_base 22: mod_base = OTHER; note = 2'-O-methylguanosine-3'-phosphorothioate
  modified_base 23: mod_base = OTHER; note = 2'-O-methyladenosine
tgtactctcattgtggatgacga

SEQ ID NO: 2530 - RNA, 19 nt, synthetic construct
  source 1..19: mol_type = other RNA
  modified_base 1: mod_base = OTHER; note = 2'-O-methoxyethyl(MOE) guanosine-3'-phosphorothioate
  modified_base 2: mod_base = OTHER; note 2'-O-methoxyethyl(MOE)-5-methylcytidine-3'-phosphorothioate
  modified_base 3: mod_base = OTHER; note = 2'-O-methoxyethyl(MOE)-thymidine(or 5-methyluridine)-3'-phosphate
  modified_base 4: mod_base = OTHER; note = 2'-O-methoxyethyl(MOE) adenosine-3'-phosphate
  modified_base 5: mod_base = OTHER; note = 2'-O-methoxyethyl(MOE) guanosine-3'-phosphate
  modified_base 6: mod_base = OTHER; note = 2'-O-methoxyethyl(MOE)-thymidine(or 5-methyluridine)-3'-phosphate
  modified_base 7: mod_base = OTHER; note = 2'-fluorocytidine-3'-phosphate
  modified_base 8: mod_base = OTHER; note = 2'-O-methoxyethyl(MOE) guanosine-3'-phosphate
  modified_base 9: mod_base = OTHER; note = 2'-fluorocytidine-3'-phosphate
  modified_base 10: mod_base = OTHER; note = 2'-fluorouridine-3'-phosphate
  modified_base 11: mod_base = OTHER; note = 2'-fluoroguanosine-3'-phosphate
  modified_base 12: mod_base = OTHER; note = 2'-O-methoxyethyl(MOE)-5-methylcytidine-3'-phosphate
  modified_base 13: mod_base = OTHER; note = 2'-O-methoxyethyl(MOE) adenosine-3'-phosphate
  modified_base 14: mod_base = OTHER; note = 2'-O-methoxyethyl(MOE) adenosine-3'-phosphate
  modified_base 15: mod_base = OTHER; note = 2'-O-methoxyethyl(MOE) adenosine-3'-phosphate
  modified_base 16: mod_base = OTHER; note = 2'-O-methoxyethyl(MOE) adenosine-3'-phosphate
  modified_base 17: mod_base = OTHER; note = 2'-O-methoxyethyl(MOE)-5-methylcytidine-3'-phosphate
  modified_base 18: mod_base = OTHER; note = 2'-O-methoxyethyl(MOE)-thymidine(or 5-methyluridine)-3'-phosphate
  modified_base 19: mod_base = OTHER; note = 2'-O-methoxyethyl(MOE)-thymidine(or 5-methyluridine)
gctagtcgctgcaaaactt

SEQ ID NO: 2531 - RNA, 21 nt, synthetic construct
  source 1..21: mol_type = other RNA
  modified_base 1: mod_base = OTHER; note = 2'-O-methoxyethyl(MOE) guanosine-3'-phosphorothioate
  modified_base 2: mod_base = OTHER; note 2'-O-methoxyethyl(MOE)-5-methylcytidine-3'-phosphorothioate
  modified_base 3: mod_base = OTHER; note = 2'-O-methoxyethyl(MOE) adenosine-3'-phosphate
  modified_base 4: mod_base = OTHER; note = 2'-O-methoxyethyl(MOE) adenosine-3'-phosphate
  modified_base 5: mod_base = OTHER; note = 2'-O-methoxyethyl(MOE) adenosine-3'-phosphate
  modified_base 6: mod_base = OTHER; note = 2'-O-methoxyethyl(MOE) guanosine-3'-phosphate
  modified_base 7: mod_base = OTHER; note = 2'-fluoroguanosine-3'-phosphate
  modified_base 8: mod_base = OTHER; note = 2'-O-methoxyethyl(MOE)-5-methylcytidine-3'-phosphate
  modified_base 9: mod_base = OTHER; note = 2'-fluorocytidine-3'-phosphate
  modified_base 10: mod_base = OTHER; note = 2'-fluoroadenosine-3'-phosphate
  modified_base 11: mod_base = OTHER; note = 2'-fluoroguanosine-3'-phosphate
  modified_base 12: mod_base = OTHER; note = 2'-O-methoxyethyl(MOE)-5-methylcytidine-3'-phosphate
  modified_base 13: mod_base = OTHER; note = 2'-O-methoxyethyl(MOE) adenosine-3'-phosphate
  modified_base 14: mod_base = OTHER; note = 2'-O-methoxyethyl(MOE) guanosine-3'-phosphate
  modified_base 15: mod_base = OTHER; note = 2'-O-methoxyethyl(MOE)-5-methylcytidine-3'-phosphate
  modified_base 16: mod_base = OTHER; note = 2'-O-methoxyethyl(MOE) adenosine-3'-phosphate
  modified_base 17: mod_base = OTHER; note = 2'-O-methoxyethyl(MOE) guanosine-3'-phosphate
  modified_base 18: mod_base = OTHER; note = 2'-O-methoxyethyl(MOE) adenosine-3'-phosphate
  modified_base 19: mod_base = OTHER; note = 2'-O-methoxyethyl(MOE)-thymidine(or 5-methyluridine)-3'-phosphate
  modified_base 20: mod_base = OTHER; note = 2'-O-methoxyethyl(MOE) adenosine-3'-phosphate
  modified_base 21: mod_base = OTHER; note = 2'-O-methoxyethyl(MOE) adenosine
gcaaaggccagcagcagataa

SEQ ID NO: 2532 - RNA, 21 nt, synthetic construct
  source 1..21: mol_type = other RNA
  modified_base 1: mod_base = OTHER; note = 2'-O-methoxyethyl(MOE) adenosine-3'-phosphorothioate
  modified_base 2: mod_base = OTHER; note = 2'-O-methoxyethyl(MOE) guanosine-3'-phosphorothioate
  modified_base 3: mod_base = OTHER; note = 2'-O-methoxyethyl(MOE)-5-methylcytidine-3'-phosphate
  modified_base 4: mod_base = OTHER; note = 2'-O-methoxyethyl(MOE)-5-methylcytidine-3'-phosphate
  modified_base 5: mod_base = OTHER; note = 2'-O-methoxyethyl(MOE) guanosine-3'-phosphate
  modified_base 6: mod_base = OTHER; note = 2'-O-methoxyethyl(MOE)-thymidine(or 5-methyluridine)-3'-phosphate
  modified_base 7: mod_base = OTHER; note = 2'-fluorouridine-3'-phosphate
  modified_base 8: mod_base = OTHER; note = 2'-O-methoxyethyl(MOE)-thymidine(or 5-methyluridine)-3'-phosphate
  modified_base 9: mod_base = OTHER; note = 2'-fluorocytidine-3'-phosphate
  modified_base 10: mod_base = OTHER; note = 2'-fluorouridine-3'-phosphate
  modified_base 11: mod_base = OTHER; note = 2'-fluorocytidine-3'-phosphate
  modified_base 12: mod_base = OTHER; note = 2'-O-methoxyethyl(MOE)-5-methylcytidine-3'-phosphate
  modified_base 13: mod_base = OTHER; note = 2'-O-methoxyethyl(MOE)-thymidine(or 5-methyluridine)-3'-phosphate
  modified_base 14: mod_base = OTHER; note = 2'-O-methoxyethyl(MOE)-thymidine(or 5-methyluridine)-3'-phosphate
  modified_base 15: mod_base = OTHER; note = 2'-O-methoxyethyl(MOE) guanosine-3'-phosphate
  modified_base 16: mod_base = OTHER; note = 2'-O-methoxyethyl(MOE) guanosine-3'-phosphate
  modified_base 17: mod_base = OTHER; note = 2'-O-methoxyethyl(MOE)-thymidine(or 5-methyluridine)-3'-phosphate
  modified_base 18: mod_base = OTHER; note = 2'-O-methoxyethyl(MOE)-5-methylcytidine-3'-phosphate
  modified_base 19: mod_base = OTHER; note = 2'-O-methoxyethyl(MOE)-thymidine(or 5-methyluridine)-3'-phosphate
  modified_base 20: mod_base = OTHER; note = 2'-O-methoxyethyl(MOE) adenosine-3'-phosphate
  modified_base 21: mod_base = OTHER; note = 2'-O-methoxyethyl(MOE) adenosine
agccgtttctccttggtctaa

SEQ ID NO: 2533 - RNA, 21 nt, synthetic construct
  source 1..21: mol_type = other RNA
  modified_base 1: mod_base = OTHER; note = 2'-O-methoxyethyl(MOE) adenosine-3'-phosphorothioate
  modified_base 2: mod_base = OTHER; note = 2'-fluoroadenosine-3'-phosphorothioate
  modified_base 3: mod_base = OTHER; note = 2'-O-methoxyethyl(MOE) guanosine-3'-phosphate
  modified_base 4: mod_base = OTHER; note = 2'-fluorouridine-3'-phosphate
  modified_base 5: mod_base = OTHER; note = 2'-O-methoxyethyl(MOE)-thymidine(or 5-methyluridine)-3'-phosphate
  modified_base 6: mod_base = OTHER; note = 2'-fluorouridine-3'-phosphate
  modified_base 7: mod_base = OTHER; note = 2'-O-methoxyethyl(MOE)-thymidine(or 5-methyluridine)-3'-phosphate
  modified_base 8: mod_base = OTHER; note = 2'-O-methoxyethyl(MOE) guanosine-3'-phosphate
  modified_base 9: mod_base = OTHER; note = 2'-O-methoxyethyl(MOE)-5-methylcytidine-3'-phosphate
  modified_base 10: mod_base = OTHER; note = 2'-O-methoxyethyl(MOE) adenosine-3'-phosphate
  modified_base 11: mod_base = OTHER; note = 2'-O-methoxyethyl(MOE) guanosine-3'-phosphate
  modified_base 12: mod_base = OTHER; note = 2'-fluorocytidine-3'-phosphate
  modified_base 13: mod_base = OTHER; note = 2'-O-methoxyethyl(MOE) guanosine-3'-phosphate
  modified_base 14: mod_base = OTHER; note = 2'-fluoroadenosine-3'-phosphate
  modified_base 15: mod_base = OTHER; note = 2'-O-methoxyethyl(MOE)-5-methylcytidine-3'-phosphate
  modified_base 16: mod_base = OTHER; note = 2'-O-methoxyethyl(MOE)-thymidine(or 5-methyluridine)-3'-phosphate
  modified_base 17: mod_base = OTHER; note = 2'-O-methoxyethyl(MOE) adenosine-3'-phosphate
  modified_base 18: mod_base = OTHER; note = 2'-O-methoxyethyl(MOE) guanosine-3'-phosphate
  modified_base 19: mod_base = OTHER; note 2'-O-methoxyethyl(MOE)-5-methylcytidine-3'-phosphorothioate
  modified_base 20: mod_base = OTHER; note = 2'-O-methoxyethyl(MOE)-thymidine(or 5-methyluridine)-3'- phosphorothioate
  modified_base 21: mod_base = OTHER; note = 2'-O-methoxyethyl(MOE)-thymidine(or 5-methyluridine)
aagttttgcagcgactagctt

SEQ ID NO: 2534 - RNA, 23 nt, synthetic construct
  source 1..23: mol_type = other RNA
  modified_base 1: mod_base = OTHER; note = 2'-O-methoxyethyl(MOE)-thymidine(or 5-methyluridine)-3'- phosphorothioate
  modified_base 2: mod_base = OTHER; note = 2'-fluorouridine-3'-phosphorothioate
  modified_base 3: mod_base = OTHER; note = 2'-O-methoxyethyl(MOE) adenosine-3'-phosphate
  modified_base 4: mod_base = OTHER; note = 2'-fluorouridine-3'-phosphate
  modified_base 5: mod_base = OTHER; note = 2'-O-methoxyethyl(MOE)-5-methylcytidine-3'-phosphate
  modified_base 6: mod_base = OTHER; note = 2'-fluorouridine-3'-phosphate
  modified_base 7: mod_base = OTHER; note = 2'-O-methoxyethyl(MOE) guanosine-3'-phosphate
  modified_base 8: mod_base = OTHER; note = 2'-O-methoxyethyl(MOE)-5-methylcytidine-3'-phosphate
  modified_base 9: mod_base = OTHER; note = 2'-O-methoxyethyl(MOE)-thymidine(or 5-methyluridine)-3'-phosphate
  modified_base 10: mod_base = OTHER; note = 2'-O-methoxyethyl(MOE) guanosine-3'-phosphate
  modified_base 11: mod_base = OTHER; note = 2'-O-methoxyethyl(MOE)-5-methylcytidine-3'-phosphate
  modified_base 12: mod_base = OTHER; note = 2'-O-methoxyethyl(MOE)-thymidine(or 5-methyluridine)-3'-phosphate
  modified_base 13: mod_base = OTHER; note = 2'-O-methoxyethyl(MOE) guanosine-3'-phosphate
  modified_base 14: mod_base = OTHER; note = 2'-fluoroguanosine-3'-phosphate
  modified_base 15: mod_base = OTHER; note = 2'-O-methoxyethyl(MOE)-5-methylcytidine-3'-phosphate
  modified_base 16: mod_base = OTHER; note = 2'-fluorocytidine-3'-phosphate
  modified_base 17: mod_base = OTHER; note = 2'-O-methoxyethyl(MOE)-thymidine(or 5-methyluridine)-3'-phosphate
  modified_base 18: mod_base = OTHER; note = 2'-O-methoxyethyl(MOE)-thymidine(or 5-methyluridine)-3'-phosphate
  modified_base 19: mod_base = OTHER; note = 2'-O-methoxyethyl(MOE)-thymidine(or 5-methyluridine)-3'-phosphate
  modified_base 20: mod_base = OTHER; note = 2'-O-methoxyethyl(MOE) guanosine-3'-phosphate
  modified_base 21: mod_base = OTHER; note 2'-O-methoxyethyl(MOE)-5-methylcytidine-3'-phosphorothioate
  modified_base 22: mod_base = OTHER; note = 2'-O-methoxyethyl(MOE)-thymidine(or 5-methyluridine)-3'- phosphorothioate
  modified_base 23: mod_base = OTHER; note = 2'-O-methoxyethyl(MOE)-thymidine(or 5-methyluridine)
ttatctgctgctggcctttgctt

SEQ ID NO: 2535 - RNA, 23 nt, synthetic construct
  source 1..23: mol_type = other RNA
  modified_base 1: mod_base = OTHER; note = 2'-O-methoxyethyl(MOE)-thymidine(or 5-methyluridine)-3'- phosphorothioate
  modified_base 2: mod_base = OTHER; note = 2'-fluorouridine-3'-phosphorothioate
  modified_base 3: mod_base = OTHER; note = 2'-O-methoxyethyl(MOE) adenosine-3'-phosphate
  modified_base 4: mod_base = OTHER; note = 2'-fluoroguanosine-3'-phosphate
  modified_base 5: mod_base = OTHER; note = 2'-O-methoxyethyl(MOE) adenosine-3'-phosphate
  modified_base 6: mod_base = OTHER; note = 2'-fluorocytidine-3'-phosphate
  modified_base 7: mod_base = OTHER; note = 2'-O-methoxyethyl(MOE)-5-methylcytidine-3'-phosphate
  modified_base 8: mod_base = OTHER; note = 2'-O-methoxyethyl(MOE) adenosine-3'-phosphate
  modified_base 9: mod_base = OTHER; note = 2'-O-methoxyethyl(MOE) adenosine-3'-phosphate
  modified_base 10: mod_base = OTHER; note = 2'-O-methoxyethyl(MOE) guanosine-3'-phosphate
  modified_base 11: mod_base = OTHER; note = 2'-O-methoxyethyl(MOE) guanosine-3'-phosphate
  modified_base 12: mod_base = OTHER; note = 2'-O-methoxyethyl(MOE) adenosine-3'-phosphate
  modified_base 13: mod_base = OTHER; note = 2'-O-methoxyethyl(MOE) guanosine-3'-phosphate
  modified_base 14: mod_base = OTHER; note = 2'-fluoroadenosine-3'-phosphate
  modified_base 15: mod_base = OTHER; note = 2'-O-methoxyethyl(MOE) adenosine-3'-phosphate
  modified_base 16: mod_base = OTHER; note = 2'-fluoroadenosine-3'-phosphate
  modified_base 17: mod_base = OTHER; note = 2'-O-methoxyethyl(MOE)-5-methylcytidine-3'-phosphate
  modified_base 18: mod_base = OTHER; note = 2'-O-methoxyethyl(MOE) guanosine-3'-phosphate
  modified_base 19: mod_base = OTHER; note = 2'-O-methoxyethyl(MOE) guanosine-3'-phosphate
  modified_base 20: mod_base = OTHER; note = 2'-O-methoxyethyl(MOE)-5-methylcytidine-3'-phosphate
  modified_base 21: mod_base = OTHER; note = 2'-O-methoxyethyl(MOE)-thymidine(or 5-methyluridine)-3'- phosphorothioate
  modified_base 22: mod_base = OTHER; note = 2'-O-methoxyethyl(MOE)-thymidine(or 5-methyluridine)-3'- phosphorothioate
  modified_base 23: mod_base = OTHER; note = 2'-O-methoxyethyl(MOE)-thymidine(or 5-methyluridine)
ttagaccaaggagaaacggcttt

SEQ ID NO: 2536 - RNA, 21 nt, synthetic construct
  source 1..21: mol_type = other RNA
  modified_base 1: mod_base = OTHER; note = 2'-fluoroguanosine-3'-phosphorothioate
  modified_base 2: mod_base = OTHER; note = 2'-O-methoxyethyl(MOE)-thymidine(or 5-methyluridine)-3'- phosphorothioate
  modified_base 3: mod_base = OTHER; note = 2'-fluorocytidine-3'-phosphate
  modified_base 4: mod_base = OTHER; note = 2'-O-methoxyethyl(MOE)-thymidine(or 5-methyluridine)-3'-phosphate
  modified_base 5: mod_base = OTHER; note = 2'-fluorocytidine-3'-phosphate
  modified_base 6: mod_base = OTHER; note = 2'-O-methoxyethyl(MOE) adenosine-3'-phosphate
  modified_base 7: mod_base = OTHER; note = 2'-fluorocytidine-3'-phosphate
  modified_base 8: mod_base = OTHER; note = 2'-O-methoxyethyl(MOE)-thymidine(or 5-methyluridine)-3'-phosphate
  modified_base 9: mod_base = OTHER; note = 2'-fluorouridine-3'-phosphate
  modified_base 10: mod_base = OTHER; note = 2'-fluorouridine-3'-phosphate
  modified_base 11: mod_base = OTHER; note = 2'-fluorocytidine-3'-phosphate
  modified_base 12: mod_base = OTHER; note = 2'-O-methoxyethyl(MOE)-5-methylcytidine-3'-phosphate
  modified_base 13: mod_base = OTHER; note = 2'-fluoroadenosine-3'-phosphate
  modified_base 14: mod_base = OTHER; note = 2'-O-methoxyethyl(MOE) guanosine-3'-phosphate
  modified_base 15: mod_base = OTHER; note = 2'-fluorocytidine-3'-phosphate
  modified_base 16: mod_base = OTHER; note = 2'-O-methoxyethyl(MOE) adenosine-3'-phosphate
  modified_base 17: mod_base = OTHER; note = 2'-fluoroadenosine-3'-phosphate
  modified_base 18: mod_base = OTHER; note = 2'-O-methoxyethyl(MOE) adenosine-3'-phosphate
  modified_base 19: mod_base = OTHER; note = 2'-fluoroadenosine-3'-phosphate
  modified_base 20: mod_base = OTHER; note = 2'-O-methoxyethyl(MOE)-thymidine(or 5-methyluridine)-3'-phosphate
  modified_base 21: mod_base = OTHER; note = 2'-fluorouridine
gtctcactttccagcaaaatt

SEQ ID NO: 2537 - RNA, 21 nt, synthetic construct
  source 1..21: mol_type = other RNA
  modified_base 1: mod_base = OTHER; note = 2'-fluoroguanosine-3'-phosphorothioate
  modified_base 2: mod_base = OTHER; note = 2'-O-methoxyethyl(MOE)-thymidine(or 5-methyluridine)-3'- phosphorothioate
  modified_base 3: mod_base = OTHER; note = 2'-fluorocytidine-3'-phosphate
  modified_base 4: mod_base = OTHER; note = 2'-O-methoxyethyl(MOE)-thymidine(or 5-methyluridine)-3'-phosphate
  modified_base 5: mod_base = OTHER; note = 2'-fluorocytidine-3'-phosphate
  modified_base 6: mod_base = OTHER; note = 2'-O-methoxyethyl(MOE) adenosine-3'-phosphate
  modified_base 7: mod_base = OTHER; note = 2'-fluorocytidine-3'-phosphate
  modified_base 8: mod_base = OTHER; note = 2'-O-methoxyethyl(MOE)-thymidine(or 5-methyluridine)-3'-phosphate
  modified_base 9: mod_base = OTHER; note = 2'-fluorouridine-3'-phosphate
  modified_base 10: mod_base = OTHER; note = 2'-fluorouridine-3'-phosphate
  modified_base 11: mod_base = OTHER; note = 2'-fluorocytidine-3'-phosphate
  modified_base 12: mod_base = OTHER; note = 2'-O-methoxyethyl(MOE)-5-methylcytidine-3'-phosphate
  modified_base 13: mod_base = OTHER; note = 2'-O-methoxyethyl(MOE) adenosine-3'-phosphate
  modified_base 14: mod_base = OTHER; note = 2'-O-methoxyethyl(MOE) guanosine-3'-phosphate
  modified_base 15: mod_base = OTHER; note = 2'-fluorocytidine-3'-phosphate
  modified_base 16: mod_base = OTHER; note = 2'-O-methoxyethyl(MOE) adenosine-3'-phosphate
  modified_base 17: mod_base = OTHER; note = 2'-O-methoxyethyl(MOE) adenosine-3'-phosphate
  modified_base 18: mod_base = OTHER; note = 2'-O-methoxyethyl(MOE) adenosine-3'-phosphate
  modified_base 19: mod_base = OTHER; note = 2'-fluoroadenosine-3'-phosphate
  modified_base 20: mod_base = OTHER; note = 2'-O-methoxyethyl(MOE)-5-methylcytidine-3'-phosphate
  modified_base 21: mod_base = OTHER; note = 2'-fluorouridine
gtctcactttccagcaaaact

SEQ ID NO: 2538 - RNA, 21 nt, synthetic construct
  source 1..21: mol_type = other RNA
  modified_base 1: mod_base = OTHER; note = 2'-O-methoxyethyl(MOE) guanosine-3'-phosphorothioate
  modified_base 2: mod_base = OTHER; note = 2'-O-methoxyethyl(MOE)-thymidine(or 5-methyluridine)-3'- phosphorothioate
  modified_base 3: mod_base = OTHER; note = 2'-O-methoxyethyl(MOE)-5-methylcytidine-3'-phosphate
  modified_base 4: mod_base = OTHER; note = 2'-O-methoxyethyl(MOE)-thymidine(or 5-methyluridine)-3'-phosphate
  modified_base 5: mod_base = OTHER; note = 2'-O-methoxyethyl(MOE)-5-methylcytidine-3'-phosphate
  modified_base 6: mod_base = OTHER; note = 2'-O-methoxyethyl(MOE) adenosine-3'-phosphate
  modified_base 7: mod_base = OTHER; note = 2'-fluorocytidine-3'-phosphate
  modified_base 8: mod_base = OTHER; note = 2'-O-methoxyethyl(MOE)-thymidine(or 5-methyluridine)-3'-phosphate
  modified_base 9: mod_base = OTHER; note = 2'-fluorouridine-3'-phosphate
  modified_base 10: mod_base = OTHER; note = 2'-fluorouridine-3'-phosphate
  modified_base 11: mod_base = OTHER; note = 2'-fluorocytidine-3'-phosphate
  modified_base 12: mod_base = OTHER; note = 2'-O-methoxyethyl(MOE)-5-methylcytidine-3'-phosphate
  modified_base 13: mod_base = OTHER; note = 2'-O-methoxyethyl(MOE) adenosine-3'-phosphate
  modified_base 14: mod_base = OTHER; note = 2'-O-methoxyethyl(MOE) guanosine-3'-phosphate
  modified_base 15: mod_base = OTHER; note = 2'-O-methoxyethyl(MOE)-5-methylcytidine-3'-phosphate
  modified_base 16: mod_base = OTHER; note = 2'-O-methoxyethyl(MOE) adenosine-3'-phosphate
  modified_base 17: mod_base = OTHER; note = 2'-O-methoxyethyl(MOE) adenosine-3'-phosphate
  modified_base 18: mod_base = OTHER; note = 2'-O-methoxyethyl(MOE) adenosine-3'-phosphate
  modified_base 19: mod_base = OTHER; note = 2'-O-methoxyethyl(MOE) adenosine-3'-phosphate
  modified_base 20: mod_base = OTHER; note = 2'-O-methoxyethyl(MOE)-thymidine(or 5-methyluridine)-3'-phosphate
  modified_base 21: mod_base = OTHER; note = 2'-O-methoxyethyl(MOE)-thymidine(or 5-methyluridine)
gtctcactttccagcaaaatt

SEQ ID NO: 2539 - RNA, 21 nt, synthetic construct
  source 1..21: mol_type = other RNA
  modified_base 1: mod_base = OTHER; note = 2'-O-methoxyethyl(MOE) guanosine-3'-phosphorothioate
  modified_base 2: mod_base = OTHER; note = 2'-O-methoxyethyl(MOE)-thymidine(or 5-methyluridine)-3'- phosphorothioate
  modified_base 3: mod_base = OTHER; note = 2'-O-methoxyethyl(MOE)-5-methylcytidine-3'-phosphate
  modified_base 4: mod_base = OTHER; note = 2'-O-methoxyethyl(MOE)-thymidine(or 5-methyluridine)-3'-phosphate
  modified_base 5: mod_base = OTHER; note = 2'-O-methoxyethyl(MOE)-5-methylcytidine-3'-phosphate
  modified_base 6: mod_base = OTHER; note = 2'-O-methoxyethyl(MOE) adenosine-3'-phosphate
  modified_base 7: mod_base = OTHER; note = 2'-fluorocytidine-3'-phosphate
  modified_base 8: mod_base = OTHER; note = 2'-O-methoxyethyl(MOE)-thymidine(or 5-methyluridine)-3'-phosphate
  modified_base 9: mod_base = OTHER; note = 2'-fluorouridine-3'-phosphate
  modified_base 10: mod_base = OTHER; note = 2'-fluorouridine-3'-phosphate
  modified_base 11: mod_base = OTHER; note = 2'-fluorocytidine-3'-phosphate
  modified_base 12: mod_base = OTHER; note = 2'-O-methoxyethyl(MOE)-5-methylcytidine-3'-phosphate
  modified_base 13: mod_base = OTHER; note = 2'-O-methoxyethyl(MOE) adenosine-3'-phosphate
  modified_base 14: mod_base = OTHER; note = 2'-O-methoxyethyl(MOE) guanosine-3'-phosphate
  modified_base 15: mod_base = OTHER; note = 2'-O-methoxyethyl(MOE)-5-methylcytidine-3'-phosphate
  modified_base 16: mod_base = OTHER; note = 2'-O-methoxyethyl(MOE) adenosine-3'-phosphate
  modified_base 17: mod_base = OTHER; note = 2'-O-methoxyethyl(MOE) adenosine-3'-phosphate
  modified_base 18: mod_base = OTHER; note = 2'-O-methoxyethyl(MOE) adenosine-3'-phosphate
  modified_base 19: mod_base = OTHER; note = 2'-O-methoxyethyl(MOE) adenosine-3'-phosphate
  modified_base 20: mod_base = OTHER; note = 2'-O-methoxyethyl(MOE)-thymidine(or 5-methyluridine)-3'-phosphate
  modified_base 21: mod_base = OTHER; note = 2'-O-methoxyethyl(MOE)-thymidine(or 5-methyluridine)
gtctcactttccagcaaaatt

SEQ ID NO: 2540 - RNA, 21 nt, synthetic construct
  source 1..21: mol_type = other RNA
  modified_base 1: mod_base = OTHER; note = 2'-O-methoxyethyl(MOE) guanosine-3'-phosphorothioate
  modified_base 2: mod_base = OTHER; note = 2'-O-methoxyethyl(MOE)-thymidine(or 5-methyluridine)-3'- phosphorothioate
  modified_base 3: mod_base = OTHER; note = 2'-O-methoxyethyl(MOE)-5-methylcytidine-3'-phosphate
  modified_base 4: mod_base = OTHER; note = 2'-O-methoxyethyl(MOE)-thymidine(or 5-methyluridine)-3'-phosphate
  modified_base 5: mod_base = OTHER; note = 2'-O-methoxyethyl(MOE)-5-methylcytidine-3'-phosphate
  modified_base 6: mod_base = OTHER; note = 2'-O-methoxyethyl(MOE) adenosine-3'-phosphate
  modified_base 7: mod_base = OTHER; note = 2'-fluorocytidine-3'-phosphate
  modified_base 8: mod_base = OTHER; note = 2'-O-methoxyethyl(MOE)-thymidine(or 5-methyluridine)-3'-phosphate
  modified_base 9: mod_base = OTHER; note = 2'-fluorouridine-3'-phosphate
  modified_base 10: mod_base = OTHER; note = 2'-fluorouridine-3'-phosphate
  modified_base 11: mod_base = OTHER; note = 2'-fluorocytidine-3'-phosphate
  modified_base 12: mod_base = OTHER; note = 2'-O-methoxyethyl(MOE)-5-methylcytidine-3'-phosphate
  modified_base 13: mod_base = OTHER; note = 2'-O-methoxyethyl(MOE) adenosine-3'-phosphate
  modified_base 14: mod_base = OTHER; note = 2'-O-methoxyethyl(MOE) guanosine-3'-phosphate
  modified_base 15: mod_base = OTHER; note = 2'-O-methoxyethyl(MOE)-5-methylcytidine-3'-phosphate
  modified_base 16: mod_base = OTHER; note = 2'-O-methoxyethyl(MOE) adenosine-3'-phosphate
  modified_base 17: mod_base = OTHER; note = 2'-O-methoxyethyl(MOE) adenosine-3'-phosphate
  modified_base 18: mod_base = OTHER; note = 2'-O-methoxyethyl(MOE) adenosine-3'-phosphate
  modified_base 19: mod_base = OTHER; note = 2'-O-methoxyethyl(MOE) adenosine-3'-phosphate
  modified_base 20: mod_base = OTHER; note = 2'-O-methoxyethyl(MOE)-5-methylcytidine-3'-phosphate
  modified_base 21: mod_base = OTHER; note = 2'-O-methoxyethyl(MOE)-thymidine(or 5-methyluridine)
gtctcactttccagcaaaact

SEQ ID NO: 2541 - RNA, 21 nt, synthetic construct
  source 1..21: mol_type = other RNA
  modified_base 1: mod_base = OTHER; note = 2'-O-methoxyethyl(MOE) guanosine-3'-phosphorothioate
  modified_base 2: mod_base = OTHER; note 2'-O-methoxyethyl(MOE)-5-methylcytidine-3'-phosphorothioate
  modified_base 3: mod_base = OTHER; note = 2'-O-methoxyethyl(MOE)-thymidine(or 5-methyluridine)-3'-phosphate
  modified_base 4: mod_base = OTHER; note = 2'-O-methoxyethyl(MOE) guanosine-3'-phosphate
  modified_base 5: mod_base = OTHER; note = 2'-O-methoxyethyl(MOE) adenosine-3'-phosphate
  modified_base 6: mod_base = OTHER; note = 2'-O-methoxyethyl(MOE) adenosine-3'-phosphate
  modified_base 7: mod_base = OTHER; note = 2'-fluorocytidine-3'-phosphate
  modified_base 8: mod_base = OTHER; note = 2'-O-methoxyethyl(MOE) adenosine-3'-phosphate
  modified_base 9: mod_base = OTHER; note = 2'-fluoroguanosine-3'-phosphate
  modified_base 10: mod_base = OTHER; note = 2'-fluorocytidine-3'-phosphate
  modified_base 11: mod_base = OTHER; note = 2'-fluoroadenosine-3'-phosphate
  modified_base 12: mod_base = OTHER; note = 2'-O-methoxyethyl(MOE)-thymidine(or 5-methyluridine)-3'-phosphate
  modified_base 13: mod_base = OTHER; note = 2'-O-methoxyethyl(MOE)-thymidine(or 5-methyluridine)-3'-phosphate
  modified_base 14: mod_base = OTHER; note = 2'-O-methoxyethyl(MOE)-5-methylcytidine-3'-phosphate
  modified_base 15: mod_base = OTHER; note = 2'-O-methoxyethyl(MOE)-thymidine(or 5-methyluridine)-3'-phosphate
  modified_base 16: mod_base = OTHER; note = 2'-O-methoxyethyl(MOE)-thymidine(or 5-methyluridine)-3'-phosphate
  modified_base 17: mod_base = OTHER; note = 2'-O-methoxyethyl(MOE)-5-methylcytidine-3'-phosphate
  modified_base 18: mod_base = OTHER; note = 2'-O-methoxyethyl(MOE)-thymidine(or 5-methyluridine)-3'-phosphate
  modified_base 19: mod_base = OTHER; note = 2'-O-methoxyethyl(MOE)-thymidine(or 5-methyluridine)-3'-phosphate
  modified_base 20: mod_base = OTHER; note = 2'-O-methoxyethyl(MOE) guanosine-3'-phosphate
  modified_base 21: mod_base = OTHER; note = 2'-O-methoxyethyl(MOE) adenosine
gctgaacagcattcttcttga

SEQ ID NO: 2542 - RNA, 21 nt, synthetic construct
  source 1..21: mol_type = other RNA
  modified_base 1: mod_base = OTHER; note = 2'-O-methoxyethyl(MOE) guanosine-3'-phosphorothioate
  modified_base 2: mod_base = OTHER; note = 2'-O-methoxyethyl(MOE)-thymidine(or 5-methyluridine)-3'- phosphorothioate
  modified_base 3: mod_base = OTHER; note = 2'-O-methoxyethyl(MOE)-5-methylcytidine-3'-phosphate
  modified_base 4: mod_base = OTHER; note = 2'-O-methoxyethyl(MOE)-thymidine(or 5-methyluridine)-3'-phosphate
  modified_base 5: mod_base = OTHER; note = 2'-O-methoxyethyl(MOE)-5-methylcytidine-3'-phosphate
  modified_base 6: mod_base = OTHER; note = 2'-O-methoxyethyl(MOE) adenosine-3'-phosphate
  modified_base 7: mod_base = OTHER; note = 2'-fluorocytidine-3'-phosphate
  modified_base 8: mod_base = OTHER; note = 2'-O-methoxyethyl(MOE)-thymidine(or 5-methyluridine)-3'-phosphate
  modified_base 9: mod_base = OTHER; note = 2'-fluorouridine-3'-phosphate
  modified_base 10: mod_base = OTHER; note = 2'-fluorouridine-3'-phosphate
  modified_base 11: mod_base = OTHER; note = 2'-fluorocytidine-3'-phosphate
  modified_base 12: mod_base = OTHER; note = 2'-O-methoxyethyl(MOE)-5-methylcytidine-3'-phosphate
  modified_base 13: mod_base = OTHER; note = 2'-O-methoxyethyl(MOE) adenosine-3'-phosphate
  modified_base 14: mod_base = OTHER; note = 2'-O-methoxyethyl(MOE) guanosine-3'-phosphate
  modified_base 15: mod_base = OTHER; note = 2'-O-methoxyethyl(MOE)-5-methylcytidine-3'-phosphate
  modified_base 16: mod_base = OTHER; note = 2'-O-methoxyethyl(MOE) adenosine-3'-phosphate
  modified_base 17: mod_base = OTHER; note = 2'-O-methoxyethyl(MOE) adenosine-3'-phosphate
  modified_base 18: mod_base = OTHER; note = 2'-O-methoxyethyl(MOE) adenosine-3'-phosphate
  modified_base 19: mod_base = OTHER; note = 2'-O-methoxyethyl(MOE) adenosine-3'-phosphorothioate
  modified_base 20: mod_base = OTHER; note = 2'-O-methoxyethyl(MOE)-thymidine(or 5-methyluridine)-3'- phosphorothioate
  modified_base 21: mod_base = OTHER; note = 2'-O-methoxyethyl(MOE)-thymidine(or 5-methyluridine)
gtctcactttccagcaaaatt

SEQ ID NO: 2543 - RNA, 21 nt, synthetic construct
  source 1..21: mol_type = other RNA
  modified_base 1: mod_base = OTHER; note = 2'-O-methoxyethyl(MOE) guanosine-3'-phosphorothioate
  modified_base 2: mod_base = OTHER; note 2'-O-methoxyethyl(MOE)-5-methylcytidine-3'-phosphorothioate
  modified_base 3: mod_base = OTHER; note = 2'-O-methoxyethyl(MOE)-thymidine(or 5-methyluridine)-3'-phosphate
  modified_base 4: mod_base = OTHER; note = 2'-O-methoxyethyl(MOE) guanosine-3'-phosphate
  modified_base 5: mod_base = OTHER; note = 2'-O-methoxyethyl(MOE) adenosine-3'-phosphate
  modified_base 6: mod_base = OTHER; note = 2'-O-methoxyethyl(MOE) adenosine-3'-phosphate
  modified_base 7: mod_base = OTHER; note = 2'-fluorocytidine-3'-phosphate
  modified_base 8: mod_base = OTHER; note = 2'-O-methoxyethyl(MOE) adenosine-3'-phosphate
  modified_base 9: mod_base = OTHER; note = 2'-fluoroguanosine-3'-phosphate
  modified_base 10: mod_base = OTHER; note = 2'-fluorocytidine-3'-phosphate
  modified_base 11: mod_base = OTHER; note = 2'-fluoroadenosine-3'-phosphate
  modified_base 12: mod_base = OTHER; note = 2'-O-methoxyethyl(MOE)-thymidine(or 5-methyluridine)-3'-phosphate
  modified_base 13: mod_base = OTHER; note = 2'-O-methoxyethyl(MOE)-thymidine(or 5-methyluridine)-3'-phosphate
  modified_base 14: mod_base = OTHER; note = 2'-O-methoxyethyl(MOE)-5-methylcytidine-3'-phosphate
  modified_base 15: mod_base = OTHER; note = 2'-O-methoxyethyl(MOE)-thymidine(or 5-methyluridine)-3'-phosphate
  modified_base 16: mod_base = OTHER; note = 2'-O-methoxyethyl(MOE)-thymidine(or 5-methyluridine)-3'-phosphate
  modified_base 17: mod_base = OTHER; note = 2'-O-methoxyethyl(MOE)-5-methylcytidine-3'-phosphate
  modified_base 18: mod_base = OTHER; note = 2'-O-methoxyethyl(MOE)-thymidine(or 5-methyluridine)-3'-phosphate
  modified_base 19: mod_base = OTHER; note = 2'-O-methoxyethyl(MOE)-thymidine(or 5-methyluridine)-3'-phosphate
  modified_base 20: mod_base = OTHER; note = 2'-O-methoxyethyl(MOE) guanosine-3'-phosphate
  modified_base 21: mod_base = OTHER; note = 2'-O-methoxyethyl(MOE) adenosine
gctgaacagcattcttcttga

SEQ ID NO: 2544 - RNA, 23 nt, synthetic construct
  source 1..23: mol_type = other RNA
  modified_base 1: mod_base = OTHER; note = 2'-O-methoxyethyl(MOE) adenosine-3'-phosphorothioate
  modified_base 2: mod_base = OTHER; note = 2'-fluoroguanosine-3'-phosphorothioate
  modified_base 3: mod_base = OTHER; note = 2'-O-methoxyethyl(MOE)-thymidine(or 5-methyluridine)-3'-phosphate
  modified_base 4: mod_base = OTHER; note = 2'-fluorouridine-3'-phosphate
  modified_base 5: mod_base = OTHER; note = 2'-O-methoxyethyl(MOE)-thymidine(or 5-methyluridine)-3'-phosphate
  modified_base 6: mod_base = OTHER; note = 2'-fluorouridine-3'-phosphate
  modified_base 7: mod_base = OTHER; note = 2'-O-methoxyethyl(MOE) guanosine-3'-phosphate
  modified_base 8: mod_base = OTHER; note = 2'-fluorocytidine-3'-phosphate
  modified_base 9: mod_base = OTHER; note = 2'-O-methoxyethyl(MOE)-thymidine(or 5-methyluridine)-3'-phosphate
  modified_base 10: mod_base = OTHER; note = 2'-fluoroguanosine-3'-phosphate
  modified_base 11: mod_base = OTHER; note = 2'-O-methoxyethyl(MOE) guanosine-3'-phosphate
  modified_base 12: mod_base = OTHER; note = 2'-O-methoxyethyl(MOE) adenosine-3'-phosphate
  modified_base 13: mod_base = OTHER; note = 2'-O-methoxyethyl(MOE) adenosine-3'-phosphate
  modified_base 14: mod_base = OTHER; note = 2'-fluoroadenosine-3'-phosphate
  modified_base 15: mod_base = OTHER; note = 2'-O-methoxyethyl(MOE) guanosine-3'-phosphate
  modified_base 16: mod_base = OTHER; note = 2'-fluorouridine-3'-phosphate
  modified_base 17: mod_base = OTHER; note = 2'-O-methoxyethyl(MOE) guanosine-3'-phosphate
  modified_base 18: mod_base = OTHER; note = 2'-fluoroadenosine-3'-phosphate
  modified_base 19: mod_base = OTHER; note = 2'-O-methoxyethyl(MOE) guanosine-3'-phosphate
  modified_base 20: mod_base = OTHER; note = 2'-fluoroadenosine-3'-phosphate
  modified_base 21: mod_base = OTHER; note 2'-O-methoxyethyl(MOE)-5-methylcytidine-3'-phosphorothioate
  modified_base 22: mod_base = OTHER; note 2'-O-methoxyethyl(MOE)-5-methylcytidine-3'-phosphorothioate
  modified_base 23: mod_base = OTHER; note = 2'-O-methoxyethyl(MOE)-5-methylcytidine
agttttgctggaaagtgagaccc

SEQ ID NO: 2545 - RNA, 23 nt, synthetic construct
  source 1..23: mol_type = other RNA
  modified_base 1: mod_base = OTHER; note = 2'-O-methoxyethyl(MOE) adenosine-3'-phosphorothioate
  modified_base 2: mod_base = OTHER; note = 2'-fluoroguanosine-3'-phosphorothioate
  modified_base 3: mod_base = OTHER; note = 2'-O-methoxyethyl(MOE)-thymidine(or 5-methyluridine)-3'-phosphate
  modified_base 4: mod_base = OTHER; note = 2'-fluorouridine-3'-phosphate
  modified_base 5: mod_base = OTHER; note = 2'-fluorouridine-3'-phosphate
  modified_base 6: mod_base = OTHER; note = 2'-fluorouridine-3'-phosphate
  modified_base 7: mod_base = OTHER; note = 2'-O-methoxyethyl(MOE) guanosine-3'-phosphate
  modified_base 8: mod_base = OTHER; note = 2'-fluorocytidine-3'-phosphate
  modified_base 9: mod_base = OTHER; note = 2'-fluorouridine-3'-phosphate
  modified_base 10: mod_base = OTHER; note = 2'-fluoroguanosine-3'-phosphate
  modified_base 11: mod_base = OTHER; note = 2'-O-methoxyethyl(MOE) guanosine-3'-phosphate
  modified_base 12: mod_base = OTHER; note = 2'-O-methoxyethyl(MOE) adenosine-3'-phosphate
  modified_base 13: mod_base = OTHER; note = 2'-O-methoxyethyl(MOE) adenosine-3'-phosphate
  modified_base 14: mod_base = OTHER; note = 2'-fluoroadenosine-3'-phosphate
  modified_base 15: mod_base = OTHER; note = 2'-O-methoxyethyl(MOE) guanosine-3'-phosphate
  modified_base 16: mod_base = OTHER; note = 2'-fluorouridine-3'-phosphate
  modified_base 17: mod_base = OTHER; note = 2'-O-methoxyethyl(MOE) guanosine-3'-phosphate
  modified_base 18: mod_base = OTHER; note = 2'-fluoroadenosine-3'-phosphate
  modified_base 19: mod_base = OTHER; note = 2'-O-methoxyethyl(MOE) guanosine-3'-phosphate
  modified_base 20: mod_base = OTHER; note = 2'-fluoroadenosine-3'-phosphate
  modified_base 21: mod_base = OTHER; note 2'-O-methoxyethyl(MOE)-5-methylcytidine-3'-phosphorothioate
  modified_base 22: mod_base = OTHER; note 2'-O-methoxyethyl(MOE)-5-methylcytidine-3'-phosphorothioate
  modified_base 23: mod_base = OTHER; note = 2'-O-methoxyethyl(MOE)-5-methylcytidine
agttttgctggaaagtgagaccc

SEQ ID NO: 2546 - RNA, 23 nt, synthetic construct
  source 1..23: mol_type = other RNA
  modified_base 1: mod_base = OTHER; note = 2'-O-methoxyethyl(MOE) adenosine-3'-phosphorothioate
  modified_base 2: mod_base = OTHER; note = 2'-fluoroguanosine-3'-phosphorothioate
  modified_base 3: mod_base = OTHER; note = 2'-O-methoxyethyl(MOE)-thymidine(or 5-methyluridine)-3'-phosphate
  modified_base 4: mod_base = OTHER; note = 2'-O-methoxyethyl(MOE)-thymidine(or 5-methyluridine)-3'-phosphate
  modified_base 5: mod_base = OTHER; note = 2'-O-methoxyethyl(MOE)-thymidine(or 5-methyluridine)-3'-phosphate
  modified_base 6: mod_base = OTHER; note = 2'-fluorouridine-3'-phosphate
  modified_base 7: mod_base = OTHER; note = 2'-O-methoxyethyl(MOE) guanosine-3'-phosphate
  modified_base 8: mod_base = OTHER; note = 2'-fluorocytidine-3'-phosphate
  modified_base 9: mod_base = OTHER; note = 2'-fluorouridine-3'-phosphate
  modified_base 10: mod_base = OTHER; note = 2'-O-methoxyethyl(MOE) guanosine-3'-phosphate
  modified_base 11: mod_base = OTHER; note = 2'-O-methoxyethyl(MOE) guanosine-3'-phosphate
  modified_base 12: mod_base = OTHER; note = 2'-O-methoxyethyl(MOE) adenosine-3'-phosphate
  modified_base 13: mod_base = OTHER; note = 2'-O-methoxyethyl(MOE) adenosine-3'-phosphate
  modified_base 14: mod_base = OTHER; note = 2'-fluoroadenosine-3'-phosphate
  modified_base 15: mod_base = OTHER; note = 2'-O-methoxyethyl(MOE) guanosine-3'-phosphate
  modified_base 16: mod_base = OTHER; note = 2'-fluorouridine-3'-phosphate
  modified_base 17: mod_base = OTHER; note = 2'-O-methoxyethyl(MOE) guanosine-3'-phosphate
  modified_base 18: mod_base = OTHER; note = 2'-O-methoxyethyl(MOE) adenosine-3'-phosphate
  modified_base 19: mod_base = OTHER; note = 2'-O-methoxyethyl(MOE) guanosine-3'-phosphate
  modified_base 20: mod_base = OTHER; note = 2'-O-methoxyethyl(MOE) adenosine-3'-phosphate
  modified_base 21: mod_base = OTHER; note 2'-O-methoxyethyl(MOE)-5-methylcytidine-3'-phosphorothioate
  modified_base 22: mod_base = OTHER; note 2'-O-methoxyethyl(MOE)-5-methylcytidine-3'-phosphorothioate
  modified_base 23: mod_base = OTHER; note = 2'-O-methoxyethyl(MOE)-5-methylcytidine
agttttgctggaaagtgagaccc

SEQ ID NO: 2547 - RNA, 23 nt, synthetic construct
  source 1..23: mol_type = other RNA
  modified_base 1: mod_base = OTHER; note = 2'-O-methoxyethyl(MOE) adenosine-3'-phosphorothioate
  modified_base 2: mod_base = OTHER; note = 2'-fluoroguanosine-3'-phosphorothioate
  modified_base 3: mod_base = OTHER; note = 2'-O-methoxyethyl(MOE)-thymidine(or 5-methyluridine)-3'-phosphate
  modified_base 4: mod_base = OTHER; note = 2'-fluorouridine-3'-phosphate
  modified_base 5: mod_base = OTHER; note = 2'-fluorouridine-3'-phosphate
  modified_base 6: mod_base = OTHER; note = 2'-fluorouridine-3'-phosphate
  modified_base 7: mod_base = OTHER; note = 2'-O-methoxyethyl(MOE) guanosine-3'-phosphate
  modified_base 8: mod_base = OTHER; note = 2'-fluorocytidine-3'-phosphate
  modified_base 9: mod_base = OTHER; note = 2'-fluorouridine-3'-phosphate
  modified_base 10: mod_base = OTHER; note = 2'-O-methoxyethyl(MOE) guanosine-3'-phosphate
  modified_base 11: mod_base = OTHER; note = 2'-O-methoxyethyl(MOE) guanosine-3'-phosphate
  modified_base 12: mod_base = OTHER; note = 2'-O-methoxyethyl(MOE) adenosine-3'-phosphate
  modified_base 13: mod_base = OTHER; note = 2'-O-methoxyethyl(MOE) adenosine-3'-phosphate
  modified_base 14: mod_base = OTHER; note = 2'-fluoroadenosine-3'-phosphate
  modified_base 15: mod_base = OTHER; note = 2'-O-methoxyethyl(MOE) guanosine-3'-phosphate
  modified_base 16: mod_base = OTHER; note = 2'-fluorouridine-3'-phosphate
  modified_base 17: mod_base = OTHER; note = 2'-O-methoxyethyl(MOE) guanosine-3'-phosphate
  modified_base 18: mod_base = OTHER; note = 2'-O-methoxyethyl(MOE) adenosine-3'-phosphate
  modified_base 19: mod_base = OTHER; note = 2'-O-methoxyethyl(MOE) guanosine-3'-phosphate
  modified_base 20: mod_base = OTHER; note = 2'-O-methoxyethyl(MOE) adenosine-3'-phosphate
  modified_base 21: mod_base = OTHER; note = 2'-O-methoxyethyl(MOE)-5-methylcytidine-3'-phosphate
  modified_base 22: mod_base = OTHER; note 2'-O-methoxyethyl(MOE)-5-methylcytidine-3'-phosphorothioate
  modified_base 23: mod_base = OTHER; note = 2'-O-methoxyethyl(MOE)-5-methylcytidine
agttttgctggaaagtgagaccc

SEQ ID NO: 2548 - RNA, 23 nt, synthetic construct
  source 1..23: mol_type = other RNA
  modified_base 1: mod_base = OTHER; note = 2'-O-methoxyethyl(MOE) adenosine-3'-phosphorothioate
  modified_base 2: mod_base = OTHER; note = 2'-fluoroguanosine-3'-phosphorothioate
  modified_base 3: mod_base = OTHER; note = 2'-O-methoxyethyl(MOE)-thymidine(or 5-methyluridine)-3'-phosphate
  modified_base 4: mod_base = OTHER; note = 2'-fluorouridine-3'-phosphate
  modified_base 5: mod_base = OTHER; note = 2'-fluorouridine-3'-phosphate
  modified_base 6: mod_base = OTHER; note = 2'-fluorouridine-3'-phosphate
  modified_base 7: mod_base = OTHER; note = 2'-O-methoxyethyl(MOE) guanosine-3'-phosphate
  modified_base 8: mod_base = OTHER; note = 2'-fluorocytidine-3'-phosphate
  modified_base 9: mod_base = OTHER; note = 2'-fluorouridine-3'-phosphate
  modified_base 10: mod_base = OTHER; note = 2'-O-methoxyethyl(MOE) guanosine-3'-phosphate
  modified_base 11: mod_base = OTHER; note = 2'-O-methoxyethyl(MOE) guanosine-3'-phosphate
  modified_base 12: mod_base = OTHER; note = 2'-O-methoxyethyl(MOE) adenosine-3'-phosphate
  modified_base 13: mod_base = OTHER; note = 2'-O-methoxyethyl(MOE) adenosine-3'-phosphate
  modified_base 14: mod_base = OTHER; note = 2'-fluoroadenosine-3'-phosphate
  modified_base 15: mod_base = OTHER; note = 2'-O-methoxyethyl(MOE) guanosine-3'-phosphate
  modified_base 16: mod_base = OTHER; note = 2'-fluorouridine-3'-phosphate
  modified_base 17: mod_base = OTHER; note = 2'-O-methoxyethyl(MOE) guanosine-3'-phosphate
  modified_base 18: mod_base = OTHER; note = 2'-O-methoxyethyl(MOE) adenosine-3'-phosphate
  modified_base 19: mod_base = OTHER; note = 2'-O-methoxyethyl(MOE) guanosine-3'-phosphate
  modified_base 20: mod_base = OTHER; note = 2'-O-methoxyethyl(MOE) adenosine-3'-phosphate
  modified_base 21: mod_base = OTHER; note 2'-O-methoxyethyl(MOE)-5-methylcytidine-3'-phosphorothioate
  modified_base 22: mod_base = OTHER; note 2'-O-methoxyethyl(MOE)-5-methylcytidine-3'-phosphorothioate
  modified_base 23: mod_base = OTHER; note = 2'-O-methoxyethyl(MOE)-5-methylcytidine
agttttgctggaaagtgagaccc

SEQ ID NO: 2549 - RNA, 23 nt, synthetic construct
  source 1..23: mol_type = other RNA
  modified_base 1: mod_base = OTHER; note = 2'-O-methoxyethyl(MOE)-thymidine(or 5-methyluridine)-3'- phosphorothioate
  modified_base 2: mod_base = OTHER; note = 2'-fluorocytidine-3'-phosphorothioate
  modified_base 3: mod_base = OTHER; note = 2'-O-methoxyethyl(MOE) adenosine-3'-phosphate
  modified_base 4: mod_base = OTHER; note = 2'-O-methoxyethyl(MOE) adenosine-3'-phosphate
  modified_base 5: mod_base = OTHER; note = 2'-O-methoxyethyl(MOE) adenosine-3'-phosphate
  modified_base 6: mod_base = OTHER; note = 2'-fluoroadenosine-3'-phosphate
  modified_base 7: mod_base = OTHER; note = 2'-O-methoxyethyl(MOE) adenosine-3'-phosphate
  modified_base 8: mod_base = OTHER; note = 2'-fluoroadenosine-3'-phosphate
  modified_base 9: mod_base = OTHER; note = 2'-fluoroadenosine-3'-phosphate
  modified_base 10: mod_base = OTHER; note = 2'-O-methoxyethyl(MOE) adenosine-3'-phosphate
  modified_base 11: mod_base = OTHER; note = 2'-O-methoxyethyl(MOE)-thymidine(or 5-methyluridine)-3'-phosphate
  modified_base 12: mod_base = OTHER; note = 2'-O-methoxyethyl(MOE) guanosine-3'-phosphate
  modified_base 13: mod_base = OTHER; note = 2'-O-methoxyethyl(MOE)-5-methylcytidine-3'-phosphate
  modified_base 14: mod_base = OTHER; note = 2'-fluorouridine-3'-phosphate
  modified_base 15: mod_base = OTHER; note = 2'-O-methoxyethyl(MOE) guanosine-3'-phosphate
  modified_base 16: mod_base = OTHER; note = 2'-fluorouridine-3'-phosphate
  modified_base 17: mod_base = OTHER; note = 2'-O-methoxyethyl(MOE)-thymidine(or 5-methyluridine)-3'-phosphate
  modified_base 18: mod_base = OTHER; note = 2'-O-methoxyethyl(MOE)-5-methylcytidine-3'-phosphate
  modified_base 19: mod_base = OTHER; note = 2'-O-methoxyethyl(MOE) adenosine-3'-phosphate
  modified_base 20: mod_base = OTHER; note = 2'-O-methoxyethyl(MOE) guanosine-3'-phosphate
  modified_base 21: mod_base = OTHER; note 2'-O-methoxyethyl(MOE)-5-methylcytidine-3'-phosphorothioate
  modified_base 22: mod_base = OTHER; note = 2'-O-methoxyethyl(MOE) adenosine-3'-phosphorothioate
  modified_base 23: mod_base = OTHER; note = 2'-O-methoxyethyl(MOE)-5-methylcytidine
tcaaaaaaaatgctgttcagcac

SEQ ID NO: 2550 - RNA, 23 nt, synthetic construct
  source 1..23: mol_type = other RNA
  modified_base 1: mod_base = OTHER; note = 2'-O-methoxyethyl(MOE) adenosine-3'-phosphorothioate
  modified_base 2: mod_base = OTHER; note = 2'-fluoroguanosine-3'-phosphorothioate
  modified_base 3: mod_base = OTHER; note = 2'-O-methoxyethyl(MOE)-thymidine(or 5-methyluridine)-3'-phosphate
  modified_base 4: mod_base = OTHER; note = 2'-O-methoxyethyl(MOE)-thymidine(or 5-methyluridine)-3'-phosphate
  modified_base 5: mod_base = OTHER; note = 2'-O-methoxyethyl(MOE)-thymidine(or 5-methyluridine)-3'-phosphate
  modified_base 6: mod_base = OTHER; note = 2'-fluorouridine-3'-phosphate
  modified_base 7: mod_base = OTHER; note = 2'-O-methoxyethyl(MOE) guanosine-3'-phosphate
  modified_base 8: mod_base = OTHER; note = 2'-fluorocytidine-3'-phosphate
  modified_base 9: mod_base = OTHER; note = 2'-fluorouridine-3'-phosphate
  modified_base 10: mod_base = OTHER; note = 2'-O-methoxyethyl(MOE) guanosine-3'-phosphate
  modified_base 11: mod_base = OTHER; note = 2'-O-methoxyethyl(MOE) guanosine-3'-phosphate
  modified_base 12: mod_base = OTHER; note = 2'-O-methoxyethyl(MOE) adenosine-3'-phosphate
  modified_base 13: mod_base = OTHER; note = 2'-O-methoxyethyl(MOE) adenosine-3'-phosphate
  modified_base 14: mod_base = OTHER; note = 2'-fluoroadenosine-3'-phosphate
  modified_base 15: mod_base = OTHER; note = 2'-O-methoxyethyl(MOE) guanosine-3'-phosphate
  modified_base 16: mod_base = OTHER; note = 2'-fluorouridine-3'-phosphate
  modified_base 17: mod_base = OTHER; note = 2'-O-methoxyethyl(MOE) guanosine-3'-phosphate
  modified_base 18: mod_base = OTHER; note = 2'-O-methoxyethyl(MOE) adenosine-3'-phosphate
  modified_base 19: mod_base = OTHER; note = 2'-O-methoxyethyl(MOE) guanosine-3'-phosphate
  modified_base 20: mod_base = OTHER; note = 2'-O-methoxyethyl(MOE) adenosine-3'-phosphate
  modified_base 21: mod_base = OTHER; note 2'-O-methoxyethyl(MOE)-5-methylcytidine-3'-phosphorothioate
  modified_base 22: mod_base = OTHER; note 2'-O-methoxyethyl(MOE)-5-methylcytidine-3'-phosphorothioate
  modified_base 23: mod_base = OTHER; note = 2'-O-methoxyethyl(MOE)-5-methylcytidine
agttttgctggaaagtgagaccc

SEQ ID NO: 2551 - RNA, 23 nt, synthetic construct
  source 1..23: mol_type = other RNA
  modified_base 1: mod_base = OTHER; note = 2'-O-methoxyethyl(MOE)-thymidine(or 5-methyluridine)-3'- phosphorothioate
  modified_base 2: mod_base = OTHER; note = 2'-fluorocytidine-3'-phosphorothioate
  modified_base 3: mod_base = OTHER; note = 2'-O-methoxyethyl(MOE) adenosine-3'-phosphate
  modified_base 4: mod_base = OTHER; note = 2'-O-methoxyethyl(MOE) adenosine-3'-phosphate
  modified_base 5: mod_base = OTHER; note = 2'-O-methoxyethyl(MOE) adenosine-3'-phosphate
  modified_base 6: mod_base = OTHER; note = 2'-fluoroadenosine-3'-phosphate
  modified_base 7: mod_base = OTHER; note = 2'-O-methoxyethyl(MOE) adenosine-3'-phosphate
  modified_base 8: mod_base = OTHER; note = 2'-fluoroadenosine-3'-phosphate
  modified_base 9: mod_base = OTHER; note = 2'-fluoroadenosine-3'-phosphate
  modified_base 10: mod_base = OTHER; note = 2'-O-methoxyethyl(MOE) adenosine-3'-phosphate
  modified_base 11: mod_base = OTHER; note = 2'-O-methoxyethyl(MOE)-thymidine(or 5-methyluridine)-3'-phosphate
  modified_base 12: mod_base = OTHER; note = 2'-O-methoxyethyl(MOE) guanosine-3'-phosphate
  modified_base 13: mod_base = OTHER; note = 2'-O-methoxyethyl(MOE)-5-methylcytidine-3'-phosphate
  modified_base 14: mod_base = OTHER; note = 2'-fluorouridine-3'-phosphate
  modified_base 15: mod_base = OTHER; note = 2'-O-methoxyethyl(MOE) guanosine-3'-phosphate
  modified_base 16: mod_base = OTHER; note = 2'-fluorouridine-3'-phosphate
  modified_base 17: mod_base = OTHER; note = 2'-O-methoxyethyl(MOE)-thymidine(or 5-methyluridine)-3'-phosphate
  modified_base 18: mod_base = OTHER; note = 2'-O-methoxyethyl(MOE)-5-methylcytidine-3'-phosphate
  modified_base 19: mod_base = OTHER; note = 2'-O-methoxyethyl(MOE) adenosine-3'-phosphate
  modified_base 20: mod_base = OTHER; note = 2'-O-methoxyethyl(MOE) guanosine-3'-phosphate
  modified_base 21: mod_base = OTHER; note 2'-O-methoxyethyl(MOE)-5-methylcytidine-3'-phosphorothioate
  modified_base 22: mod_base = OTHER; note = 2'-O-methoxyethyl(MOE) adenosine-3'-phosphorothioate
  modified_base 23: mod_base = OTHER; note = 2'-O-methoxyethyl(MOE)-5-methylcytidine
tcaaaaaaaatgctgttcagcac

SEQ ID NO: 2552 - RNA, 19 nt, synthetic construct
  source 1..19: mol_type = other RNA
  modified_base 1: mod_base = OTHER; note = 2'-O-methylcytidine-3'-phosphate
  modified_base 2: mod_base = OTHER; note = 2'-O-methylguanosine-3'-phosphate
  modified_base 3: mod_base = OTHER; note = 2'-O-methyladenosine-3'-phosphate
  modified_base 4: mod_base = OTHER; note = 2'-O-methylcytidine-3'-phosphate
  modified_base 5: mod_base = OTHER; note = 2'-O-methylcytidine-3'-phosphate
  modified_base 6: mod_base = OTHER; note = 2'-O-methyladenosine-3'-phosphate
  modified_base 7: mod_base = OTHER; note = 2'-fluoroguanosine-3'-phosphate
  modified_base 8: mod_base = OTHER; note = 2'-fluorocytidine-3'-phosphate
  modified_base 9: mod_base = OTHER; note = 2'-fluorouridine-3'-phosphate
  modified_base 10: mod_base = OTHER; note = 2'-O-methyluridine-3'-phosphate
  modified_base 11: mod_base = OTHER; note = 2'-O-methylguanosine-3'-phosphate
  modified_base 12: mod_base = OTHER; note = 2'-O-methyluridine-3'-phosphate
  modified_base 13: mod_base = OTHER; note = 2'-O-methyluridine-3'-phosphate
  modified_base 14: mod_base = OTHER; note = 2'-O-methyluridine-3'-phosphate
  modified_base 15: mod_base = OTHER; note = 2'-O-methylguanosine-3'-phosphate
  modified_base 16: mod_base = OTHER; note = 2'-O-methyluridine-3'-phosphate
  modified_base 17: mod_base = OTHER; note = 2'-O-methylguanosine-3'-phosphorothioate
  modified_base 18: mod_base = OTHER; note = 2'-O-methyladenosine-3'-phosphorothioate
  modified_base 19: mod_base = OTHER; note = 2'-O-methyladenosine
cgaccagcttgtttgtgaa

SEQ ID NO: 2553 - RNA, 19 nt, synthetic construct
  source 1..19: mol_type = other RNA
  modified_base 1: mod_base = OTHER; note = 2'-O-methylguanosine-3'-phosphate
  modified_base 2: mod_base = OTHER; note = 2'-O-methyluridine-3'-phosphate
  modified_base 3: mod_base = OTHER; note = 2'-O-methylguanosine-3'-phosphate
  modified_base 4: mod_base = OTHER; note = 2'-O-methyluridine-3'-phosphate
  modified_base 5: mod_base = OTHER; note = 2'-O-methyluridine-3'-phosphate
  modified_base 6: mod_base = OTHER; note = 2'-O-methyluridine-3'-phosphate
  modified_base 7: mod_base = OTHER; note = 2'-fluorocytidine-3'-phosphate
  modified_base 8: mod_base = OTHER; note = 2'-fluorouridine-3'-phosphate
  modified_base 9: mod_base = OTHER; note = 2'-fluorocytidine-3'-phosphate
  modified_base 10: mod_base = OTHER; note = 2'-O-methylcytidine-3'-phosphate
  modified_base 11: mod_base = OTHER; note = 2'-O-methyluridine-3'-phosphate
  modified_base 12: mod_base = OTHER; note = 2'-O-methyluridine-3'-phosphate
  modified_base 13: mod_base = OTHER; note = 2'-O-methylguanosine-3'-phosphate
  modified_base 14: mod_base = OTHER; note = 2'-O-methylguanosine-3'-phosphate
  modified_base 15: mod_base = OTHER; note = 2'-O-methyluridine-3'-phosphate
  modified_base 16: mod_base = OTHER; note = 2'-O-methylcytidine-3'-phosphate
  modified_base 17: mod_base = OTHER; note = 2'-O-methyluridine-3'-phosphorothioate
  modified_base 18: mod_base = OTHER; note = 2'-O-methyladenosine-3'-phosphorothioate
  modified_base 19: mod_base = OTHER; note = 2'-O-methyluridine
gtgtttctccttggtctat

SEQ ID NO: 2554 - RNA, 19 nt, synthetic construct
  source 1..19: mol_type = other RNA
  modified_base 1: mod_base = OTHER; note = 2'-O-methylguanosine-3'-phosphate
  modified_base 2: mod_base = OTHER; note = 2'-O-methylcytidine-3'-phosphate
  modified_base 3: mod_base = OTHER; note = 2'-O-methyladenosine-3'-phosphate
  modified_base 4: mod_base = OTHER; note = 2'-O-methylguanosine-3'-phosphate
  modified_base 5: mod_base = OTHER; note = 2'-O-methyluridine-3'-phosphate
  modified_base 6: mod_base = OTHER; note = 2'-O-methyluridine-3'-phosphate
  modified_base 7: mod_base = OTHER; note = 2'-fluoroguanosine-3'-phosphate
  modified_base 8: mod_base = OTHER; note = 2'-fluoroadenosine-3'-phosphate
  modified_base 9: mod_base = OTHER; note = 2'-fluoroguanosine-3'-phosphate
  modified_base 10: mod_base = OTHER; note = 2'-O-methyladenosine-3'-phosphate
  modified_base 11: mod_base = OTHER; note = 2'-O-methyladenosine-3'-phosphate
  modified_base 12: mod_base = OTHER; note = 2'-O-methylcytidine-3'-phosphate
  modified_base 13: mod_base = OTHER; note = 2'-O-methyladenosine-3'-phosphate
  modified_base 14: mod_base = OTHER; note = 2'-O-methyladenosine-3'-phosphate
  modified_base 15: mod_base = OTHER; note = 2'-O-methyladenosine-3'-phosphate
  modified_base 16: mod_base = OTHER; note = 2'-O-methyladenosine-3'-phosphate
  modified_base 17: mod_base = OTHER; note = 2'-O-methyladenosine-3'-phosphorothioate
  modified_base 18: mod_base = OTHER; note = 2'-O-methyluridine-3'-phosphorothioate
  modified_base 19: mod_base = OTHER; note = 2'-O-methyladenosine
gcagttgagaacaaaaata

SEQ ID NO: 2555 - RNA, 19 nt, synthetic construct
  source 1..19: mol_type = other RNA
  modified_base 1: mod_base = OTHER; note 5'-(E)-vinylphosphonate-2'-O-methyluridine-3'-phosphate
  modified_base 2: mod_base = OTHER; note = 2'-fluorouridine-3'-phosphate
  modified_base 3: mod_base = OTHER; note = 2'-O-methylcytidine-3'-phosphate
  modified_base 4: mod_base = OTHER; note = 2'-fluoroadenosine-3'-phosphate
  modified_base 5: mod_base = OTHER; note = 2'-O-methylcytidine-3'-phosphate
  modified_base 6: mod_base = OTHER; note = 2'-fluoroadenosine-3'-phosphate
  modified_base 7: mod_base = OTHER; note = 2'-O-methyladenosine-3'-phosphate
  modified_base 8: mod_base = OTHER; note = 2'-fluoroadenosine-3'-phosphate
  modified_base 9: mod_base = OTHER; note = 2'-O-methylcytidine-3'-phosphate
  modified_base 10: mod_base = OTHER; note = 2'-fluoroadenosine-3'-phosphate
  modified_base 11: mod_base = OTHER; note = 2'-O-methyladenosine-3'-phosphate
  modified_base 12: mod_base = OTHER; note = 2'-fluoroguanosine-3'-phosphate
  modified_base 13: mod_base = OTHER; note = 2'-O-methylcytidine-3'-phosphate
  modified_base 14: mod_base = OTHER; note = 2'-fluorouridine-3'-phosphate
  modified_base 15: mod_base = OTHER; note = 2'-O-methylguanosine-3'-phosphate
  modified_base 16: mod_base = OTHER; note = 2'-fluoroguanosine-3'-phosphate
  modified_base 17: mod_base = OTHER; note = 2'-O-methyluridine-3'-phosphorothioate
  modified_base 18: mod_base = OTHER; note = 2'-fluorocytidine-3'-phosphorothioate
  modified_base 19: mod_base = OTHER; note = 2'-O-methylguanosine
ttcacaaacaagctggtcg

SEQ ID NO: 2556 - RNA, 19 nt, synthetic construct
  source 1..19: mol_type = other RNA
  modified_base 1: mod_base = OTHER; note 5'-(E)-vinylphosphonate-2'-O-methyluridine-3'-phosphate
  modified_base 2: mod_base = OTHER; note = 2'-fluorouridine-3'-phosphate
  modified_base 3: mod_base = OTHER; note = 2'-O-methyladenosine-3'-phosphate
  modified_base 4: mod_base = OTHER; note = 2'-fluoroguanosine-3'-phosphate
  modified_base 5: mod_base = OTHER; note = 2'-O-methyladenosine-3'-phosphate
  modified_base 6: mod_base = OTHER; note = 2'-fluorocytidine-3'-phosphate
  modified_base 7: mod_base = OTHER; note = 2'-O-methylcytidine-3'-phosphate
  modified_base 8: mod_base = OTHER; note = 2'-fluoroadenosine-3'-phosphate
  modified_base 9: mod_base = OTHER; note = 2'-O-methyladenosine-3'-phosphate
  modified_base 10: mod_base = OTHER; note = 2'-fluoroguanosine-3'-phosphate
  modified_base 11: mod_base = OTHER; note = 2'-O-methylguanosine-3'-phosphate
  modified_base 12: mod_base = OTHER; note = 2'-fluoroadenosine-3'-phosphate
  modified_base 13: mod_base = OTHER; note = 2'-O-methylguanosine-3'-phosphate
  modified_base 14: mod_base = OTHER; note = 2'-fluoroadenosine-3'-phosphate
  modified_base 15: mod_base = OTHER; note = 2'-O-methyladenosine-3'-phosphate
  modified_base 16: mod_base = OTHER; note = 2'-fluoroadenosine-3'-phosphate
  modified_base 17: mod_base = OTHER; note = 2'-O-methylcytidine-3'-phosphorothioate
  modified_base 18: mod_base = OTHER; note = 2'-fluoroadenosine-3'-phosphorothioate
  modified_base 19: mod_base = OTHER; note = 2'-O-methylcytidine
ttagaccaaggagaaacac

SEQ ID NO: 2557 - RNA, 19 nt, synthetic construct
  source 1..19: mol_type = other RNA
  modified_base 1: mod_base = OTHER; note 5'-(E)-vinylphosphonate-2'-O-methyluridine-3'-phosphate
  modified_base 2: mod_base = OTHER; note = 2'-fluoroadenosine-3'-phosphate
  modified_base 3: mod_base = OTHER; note = 2'-O-methyluridine-3'-phosphate
  modified_base 4: mod_base = OTHER; note = 2'-fluorouridine-3'-phosphate
  modified_base 5: mod_base = OTHER; note = 2'-O-methyluridine-3'-phosphate
  modified_base 6: mod_base = OTHER; note = 2'-fluorouridine-3'-phosphate
  modified_base 7: mod_base = OTHER; note = 2'-O-methyluridine-3'-phosphate
  modified_base 8: mod_base = OTHER; note = 2'-fluoroguanosine-3'-phosphate
  modified_base 9: mod_base = OTHER; note = 2'-O-methyluridine-3'-phosphate
  modified_base 10: mod_base = OTHER; note = 2'-fluorouridine-3'-phosphate
  modified_base 11: mod_base = OTHER; note = 2'-O-methylcytidine-3'-phosphate
  modified_base 12: mod_base = OTHER; note = 2'-fluorouridine-3'-phosphate
  modified_base 13: mod_base = OTHER; note = 2'-O-methylcytidine-3'-phosphate
  modified_base 14: mod_base = OTHER; note = 2'-fluoroadenosine-3'-phosphate
  modified_base 15: mod_base = OTHER; note = 2'-O-methyladenosine-3'-phosphate
  modified_base 16: mod_base = OTHER; note = 2'-fluorocytidine-3'-phosphate
  modified_base 17: mod_base = OTHER; note = 2'-O-methyluridine-3'-phosphorothioate
  modified_base 18: mod_base = OTHER; note = 2'-fluoroguanosine-3'-phosphorothioate
  modified_base 19: mod_base = OTHER; note = 2'-O-methylcytidine
tatttttgttctcaactgc

SEQ ID NO: 2558 - RNA, 20 nt, synthetic construct
  source 1..20: mol_type = other RNA
  modified_base 1: mod_base = OTHER; note = 2'-O-methylcytidine-3'-phosphorothioate
  modified_base 2: mod_base = OTHER; note = 2'-O-methyluridine-3'-phosphorothioate
  modified_base 3: mod_base = OTHER; note = 2'-O-methylguanosine-3'-phosphate
  modified_base 4: mod_base = OTHER; note = 2'-O-methyladenosine-3'-phosphate
  modified_base 5: mod_base = OTHER; note = 2'-O-methyladenosine-3'-phosphate
  modified_base 6: mod_base = OTHER; note = 2'-fluorocytidine-3'-phosphate
  modified_base 7: mod_base = OTHER; note = 2'-O-methyladenosine-3'-phosphate
  modified_base 8: mod_base = OTHER; note = 2'-fluoroguanosine-3'-phosphate
  modified_base 9: mod_base = OTHER; note = 2'-fluorocytidine-3'-phosphate
  modified_base 10: mod_base = OTHER; note = 2'-fluoroadenosine-3'-phosphate
  modified_base 11: mod_base = OTHER; note = 2'-fluorouridine-3'-phosphate
  modified_base 12: mod_base = OTHER; note = 2'-O-methyluridine-3'-phosphate
  modified_base 13: mod_base = OTHER; note = 2'-O-methyluridine-3'-phosphate
  modified_base 14: mod_base = OTHER; note = 2'-O-methyluridine-3'-phosphate
  modified_base 15: mod_base = OTHER; note = 2'-O-methyluridine-3'-phosphate
  modified_base 16: mod_base = OTHER; note = 2'-O-methyluridine-3'-phosphate
  modified_base 17: mod_base = OTHER; note = 2'-O-methyluridine-3'-phosphate
  modified_base 18: mod_base = OTHER; note = 2'-O-methyluridine-3'-phosphorothioate
  modified_base 19: mod_base = OTHER; note = 2'-O-methylguanosine-3'-phosphorothioate
  modified_base 20: mod_base = OTHER; note = 2'-O-methyladenosine
ctgaacagcattttttttga

SEQ ID NO: 2559 - RNA, 20 nt, synthetic construct
  source 1..20: mol_type = other RNA
  modified_base 1: mod_base = OTHER; note = 2'-O-methyluridine-3'-phosphorothioate
  modified_base 2: mod_base = OTHER; note = 2'-O-methyluridine-3'-phosphorothioate
  modified_base 3: mod_base = OTHER; note = 2'-O-methyluridine-3'-phosphate
  modified_base 4: mod_base = OTHER; note = 2'-O-methylguanosine-3'-phosphate
  modified_base 5: mod_base = OTHER; note = 2'-O-methyluridine-3'-phosphate
  modified_base 6: mod_base = OTHER; note = 2'-fluoroguanosine-3'-phosphate
  modified_base 7: mod_base = OTHER; note = 2'-O-methyladenosine-3'-phosphate
  modified_base 8: mod_base = OTHER; note = 2'-fluoroadenosine-3'-phosphate
  modified_base 9: mod_base = OTHER; note = 2'-fluoroadenosine-3'-phosphate
  modified_base 10: mod_base = OTHER; note = 2'-fluorocytidine-3'-phosphate
  modified_base 11: mod_base = OTHER; note = 2'-fluoroadenosine-3'-phosphate
  modified_base 12: mod_base = OTHER; note = 2'-O-methyladenosine-3'-phosphate
  modified_base 13: mod_base = OTHER; note = 2'-O-methyladenosine-3'-phosphate
  modified_base 14: mod_base = OTHER; note = 2'-O-methyladenosine-3'-phosphate
  modified_base 15: mod_base = OTHER; note = 2'-O-methyladenosine-3'-phosphate
  modified_base 16: mod_base = OTHER; note = 2'-O-methyladenosine-3'-phosphate
  modified_base 17: mod_base = OTHER; note = 2'-O-methylguanosine-3'-phosphate
  modified_base 18: mod_base = OTHER; note = 2'-O-methyluridine-3'-phosphorothioate
  modified_base 19: mod_base = OTHER; note = 2'-O-methylguanosine-3'-phosphorothioate
  modified_base 20: mod_base = OTHER; note = 2'-O-methyladenosine
tttgtgaaacaaaaaagtga

SEQ ID NO: 2560 - RNA, 20 nt, synthetic construct
  source 1..20: mol_type = other RNA
  modified_base 1: mod_base = OTHER; note = 2'-O-methyluridine-3'-phosphorothioate
  modified_base 2: mod_base = OTHER; note = 2'-O-methylguanosine-3'-phosphorothioate
  modified_base 3: mod_base = OTHER; note = 2'-O-methyladenosine-3'-phosphate
  modified_base 4: mod_base = OTHER; note = 2'-O-methyladenosine-3'-phosphate
  modified_base 5: mod_base = OTHER; note = 2'-O-methyladenosine-3'-phosphate
  modified_base 6: mod_base = OTHER; note = 2'-fluorocytidine-3'-phosphate
  modified_base 7: mod_base = OTHER; note = 2'-O-methyladenosine-3'-phosphate
  modified_base 8: mod_base = OTHER; note = 2'-fluoroadenosine-3'-phosphate
  modified_base 9: mod_base = OTHER; note = 2'-fluoroadenosine-3'-phosphate
  modified_base 10: mod_base = OTHER; note = 2'-fluoroadenosine-3'-phosphate
  modified_base 11: mod_base = OTHER; note = 2'-fluoroadenosine-3'-phosphate
  modified_base 12: mod_base = OTHER; note = 2'-O-methyladenosine-3'-phosphate
  modified_base 13: mod_base = OTHER; note = 2'-O-methylguanosine-3'-phosphate
  modified_base 14: mod_base = OTHER; note = 2'-O-methyluridine-3'-phosphate
  modified_base 15: mod_base = OTHER; note = 2'-O-methylguanosine-3'-phosphate
  modified_base 16: mod_base = OTHER; note = 2'-O-methyluridine-3'-phosphate
  modified_base 17: mod_base = OTHER; note = 2'-O-methyluridine-3'-phosphate
  modified_base 18: mod_base = OTHER; note = 2'-O-methylcytidine-3'-phosphorothioate
  modified_base 19: mod_base = OTHER; note = 2'-O-methylcytidine-3'-phosphorothioate
  modified_base 20: mod_base = OTHER; note = 2'-O-methyladenosine
tgaaacaaaaaagtgttcca

SEQ ID NO: 2561 - RNA, 20 nt, synthetic construct
  source 1..20: mol_type = other RNA
  modified_base 1: mod_base = OTHER; note = 2'-O-methyladenosine-3'-phosphorothioate
  modified_base 2: mod_base = OTHER; note = 2'-O-methyladenosine-3'-phosphorothioate
  modified_base 3: mod_base = OTHER; note = 2'-O-methyladenosine-3'-phosphate
  modified_base 4: mod_base = OTHER; note = 2'-O-methyladenosine-3'-phosphate
  modified_base 5: mod_base = OTHER; note = 2'-O-methylguanosine-3'-phosphate
  modified_base 6: mod_base = OTHER; note = 2'-fluorouridine-3'-phosphate
  modified_base 7: mod_base = OTHER; note = 2'-O-methylguanosine-3'-phosphate
  modified_base 8: mod_base = OTHER; note = 2'-fluorouridine-3'-phosphate
  modified_base 9: mod_base = OTHER; note = 2'-fluorouridine-3'-phosphate
  modified_base 10: mod_base = OTHER; note = 2'-fluorocytidine-3'-phosphate
  modified_base 11: mod_base = OTHER; note = 2'-fluorocytidine-3'-phosphate
  modified_base 12: mod_base = OTHER; note = 2'-O-methylcytidine-3'-phosphate
  modified_base 13: mod_base = OTHER; note = 2'-O-methyluridine-3'-phosphate
  modified_base 14: mod_base = OTHER; note = 2'-O-methyluridine-3'-phosphate
  modified_base 15: mod_base = OTHER; note = 2'-O-methyluridine-3'-phosphate
  modified_base 16: mod_base = OTHER; note = 2'-O-methyluridine-3'-phosphate
  modified_base 17: mod_base = OTHER; note = 2'-O-methylcytidine-3'-phosphate
  modified_base 18: mod_base = OTHER; note = 2'-O-methyladenosine-3'-phosphorothioate
  modified_base 19: mod_base = OTHER; note = 2'-O-methyladenosine-3'-phosphorothioate
  modified_base 20: mod_base = OTHER; note = 2'-O-methyladenosine
aaaagtgttcccttttcaaa

SEQ ID NO: 2562 - RNA, 20 nt, synthetic construct
  source 1..20: mol_type = other RNA
  modified_base 1: mod_base = OTHER; note = 2'-O-methyladenosine-3'-phosphorothioate
  modified_base 2: mod_base = OTHER; note = 2'-O-methyladenosine-3'-phosphorothioate
  modified_base 3: mod_base = OTHER; note = 2'-O-methylguanosine-3'-phosphate
  modified_base 4: mod_base = OTHER; note = 2'-O-methyluridine-3'-phosphate
  modified_base 5: mod_base = OTHER; note = 2'-O-methyluridine-3'-phosphate
  modified_base 6: mod_base = OTHER; note = 2'-fluoroguanosine-3'-phosphate
  modified_base 7: mod_base = OTHER; note = 2'-O-methyladenosine-3'-phosphate
  modified_base 8: mod_base = OTHER; note = 2'-fluoroguanosine-3'-phosphate
  modified_base 9: mod_base = OTHER; note = 2'-fluoroadenosine-3'-phosphate
  modified_base 10: mod_base = OTHER; note = 2'-fluoroadenosine-3'-phosphate
  modified_base 11: mod_base = OTHER; note = 2'-fluorocytidine-3'-phosphate
  modified_base 12: mod_base = OTHER; note = 2'-O-methyladenosine-3'-phosphate
  modified_base 13: mod_base = OTHER; note = 2'-O-methyladenosine-3'-phosphate
  modified_base 14: mod_base = OTHER; note = 2'-O-methyladenosine-3'-phosphate
  modified_base 15: mod_base = OTHER; note = 2'-O-methyladenosine-3'-phosphate
  modified_base 16: mod_base = OTHER; note = 2'-O-methyladenosine-3'-phosphate
  modified_base 17: mod_base = OTHER; note = 2'-O-methyluridine-3'-phosphate
  modified_base 18: mod_base = OTHER; note = 2'-O-methyluridine-3'-phosphorothioate
  modified_base 19: mod_base = OTHER; note = 2'-O-methylguanosine-3'-phosphorothioate
  modified_base 20: mod_base = OTHER; note = 2'-O-methyladenosine
aagttgagaacaaaaattga

SEQ ID NO: 2563 - RNA, 20 nt, synthetic construct
  source 1..20: mol_type = other RNA
  modified_base 1: mod_base = OTHER; note = 2'-O-methyladenosine-3'-phosphorothioate
  modified_base 2: mod_base = OTHER; note = 2'-O-methylguanosine-3'-phosphorothioate
  modified_base 3: mod_base = OTHER; note = 2'-O-methyladenosine-3'-phosphate
  modified_base 4: mod_base = OTHER; note = 2'-O-methyladenosine-3'-phosphate
  modified_base 5: mod_base = OTHER; note = 2'-O-methylcytidine-3'-phosphate
  modified_base 6: mod_base = OTHER; note = 2'-fluoroadenosine-3'-phosphate
  modified_base 7: mod_base = OTHER; note = 2'-O-methyladenosine-3'-phosphate
  modified_base 8: mod_base = OTHER; note = 2'-fluoroadenosine-3'-phosphate
  modified_base 9: mod_base = OTHER; note = 2'-fluoroadenosine-3'-phosphate
  modified_base 10: mod_base = OTHER; note = 2'-fluoroadenosine-3'-phosphate
  modified_base 11: mod_base = OTHER; note = 2'-fluorouridine-3'-phosphate
  modified_base 12: mod_base = OTHER; note = 2'-O-methyluridine-3'-phosphate
  modified_base 13: mod_base = OTHER; note = 2'-O-methylguanosine-3'-phosphate
  modified_base 14: mod_base = OTHER; note = 2'-O-methylguanosine-3'-phosphate
  modified_base 15: mod_base = OTHER; note = 2'-O-methylguanosine-3'-phosphate
  modified_base 16: mod_base = OTHER; note = 2'-O-methyluridine-3'-phosphate
  modified_base 17: mod_base = OTHER; note = 2'-O-methyluridine-3'-phosphate
  modified_base 18: mod_base = OTHER; note = 2'-O-methyluridine-3'-phosphorothioate
  modified_base 19: mod_base = OTHER; note = 2'-O-methyluridine-3'-phosphorothioate
  modified_base 20: mod_base = OTHER; note = 2'-O-methyladenosine
agaacaaaaattgggtttta

SEQ ID NO: 2564 - RNA, 20 nt, synthetic construct
  source 1..20: mol_type = other RNA
  modified_base 1: mod_base = OTHER; note = 2'-O-methyladenosine-3'-phosphorothioate
  modified_base 2: mod_base = OTHER; note = 2'-O-methyladenosine-3'-phosphorothioate
  modified_base 3: mod_base = OTHER; note = 2'-O-methyladenosine-3'-phosphate
  modified_base 4: mod_base = OTHER; note = 2'-O-methyladenosine-3'-phosphate
  modified_base 5: mod_base = OTHER; note = 2'-O-methyladenosine-3'-phosphate
  modified_base 6: mod_base = OTHER; note = 2'-fluorouridine-3'-phosphate
  modified_base 7: mod_base = OTHER; note = 2'-O-methyluridine-3'-phosphate
  modified_base 8: mod_base = OTHER; note = 2'-fluoroguanosine-3'-phosphate
  modified_base 9: mod_base = OTHER; note = 2'-fluoroguanosine-3'-phosphate
  modified_base 10: mod_base = OTHER; note = 2'-fluoroguanosine-3'-phosphate
  modified_base 11: mod_base = OTHER; note = 2'-fluorouridine-3'-phosphate
  modified_base 12: mod_base = OTHER; note = 2'-O-methyluridine-3'-phosphate
  modified_base 13: mod_base = OTHER; note = 2'-O-methyluridine-3'-phosphate
  modified_base 14: mod_base = OTHER; note = 2'-O-methyluridine-3'-phosphate
  modified_base 15: mod_base = OTHER; note = 2'-O-methyladenosine-3'-phosphate
  modified_base 16: mod_base = OTHER; note = 2'-O-methyladenosine-3'-phosphate
  modified_base 17: mod_base = OTHER; note = 2'-O-methyladenosine-3'-phosphate
  modified_base 18: mod_base = OTHER; note = 2'-O-methyladenosine-3'-phosphorothioate
  modified_base 19: mod_base = OTHER; note = 2'-O-methyluridine-3'-phosphorothioate
  modified_base 20: mod_base = OTHER; note = 2'-O-methyladenosine
aaaaattgggttttaaaata

SEQ ID NO: 2565 - RNA, 20 nt, synthetic construct
  source 1..20: mol_type = other RNA
  modified_base 1: mod_base = OTHER; note = 2'-O-methylguanosine-3'-phosphorothioate
  modified_base 2: mod_base = OTHER; note = 2'-O-methylguanosine-3'-phosphorothioate
  modified_base 3: mod_base = OTHER; note = 2'-O-methyluridine-3'-phosphate
  modified_base 4: mod_base = OTHER; note = 2'-O-methyluridine-3'-phosphate
  modified_base 5: mod_base = OTHER; note = 2'-O-methyluridine-3'-phosphate
  modified_base 6: mod_base = OTHER; note = 2'-fluorouridine-3'-phosphate
  modified_base 7: mod_base = OTHER; note = 2'-O-methyladenosine-3'-phosphate
  modified_base 8: mod_base = OTHER; note = 2'-fluoroadenosine-3'-phosphate
  modified_base 9: mod_base = OTHER; note = 2'-fluoroadenosine-3'-phosphate
  modified_base 10: mod_base = OTHER; note = 2'-fluoroadenosine-3'-phosphate
  modified_base 11: mod_base = OTHER; note = 2'-fluorouridine-3'-phosphate
  modified_base 12: mod_base = OTHER; note = 2'-O-methyluridine-3'-phosphate
  modified_base 13: mod_base = OTHER; note = 2'-O-methyladenosine-3'-phosphate
  modified_base 14: mod_base = OTHER; note = 2'-O-methyladenosine-3'-phosphate
  modified_base 15: mod_base = OTHER; note = 2'-O-methyladenosine-3'-phosphate
  modified_base 16: mod_base = OTHER; note = 2'-O-methylguanosine-3'-phosphate
  modified_base 17: mod_base = OTHER; note = 2'-O-methyluridine-3'-phosphate
  modified_base 18: mod_base = OTHER; note = 2'-O-methyladenosine-3'-phosphorothioate
  modified_base 19: mod_base = OTHER; note = 2'-O-methyluridine-3'-phosphorothioate
  modified_base 20: mod_base = OTHER; note = 2'-O-methyladenosine
ggttttaaaattaaagtata

SEQ ID NO: 2566 - RNA, 20 nt, synthetic construct
  source 1..20: mol_type = other RNA
  modified_base 1: mod_base = OTHER; note = 2'-O-methylguanosine-3'-phosphorothioate
  modified_base 2: mod_base = OTHER; note = 2'-O-methyluridine-3'-phosphorothioate
  modified_base 3: mod_base = OTHER; note = 2'-O-methyluridine-3'-phosphate
  modified_base 4: mod_base = OTHER; note = 2'-O-methyluridine-3'-phosphate
  modified_base 5: mod_base = OTHER; note = 2'-O-methyluridine-3'-phosphate
  modified_base 6: mod_base = OTHER; note = 2'-fluoroadenosine-3'-phosphate
  modified_base 7: mod_base = OTHER; note = 2'-O-methyladenosine-3'-phosphate
  modified_base 8: mod_base = OTHER; note = 2'-fluoroadenosine-3'-phosphate
  modified_base 9: mod_base = OTHER; note = 2'-fluoroadenosine-3'-phosphate
  modified_base 10: mod_base = OTHER; note = 2'-fluorouridine-3'-phosphate
  modified_base 11: mod_base = OTHER; note = 2'-fluorouridine-3'-phosphate
  modified_base 12: mod_base = OTHER; note = 2'-O-methyladenosine-3'-phosphate
  modified_base 13: mod_base = OTHER; note = 2'-O-methyladenosine-3'-phosphate
  modified_base 14: mod_base = OTHER; note = 2'-O-methyladenosine-3'-phosphate
  modified_base 15: mod_base = OTHER; note = 2'-O-methylguanosine-3'-phosphate
  modified_base 16: mod_base = OTHER; note = 2'-O-methyluridine-3'-phosphate
  modified_base 17: mod_base = OTHER; note = 2'-O-methyladenosine-3'-phosphate
  modified_base 18: mod_base = OTHER; note = 2'-O-methyluridine-3'-phosphorothioate
  modified_base 19: mod_base = OTHER; note = 2'-O-methyladenosine-3'-phosphorothioate
  modified_base 20: mod_base = OTHER; note = 2'-O-methyladenosine
gttttaaaattaaagtataa

SEQ ID NO: 2567 - RNA, 20 nt, synthetic construct
  source 1..20: mol_type = other RNA
  modified_base 1: mod_base = OTHER; note = 2'-O-methyluridine-3'-phosphorothioate
  modified_base 2: mod_base = OTHER; note = 2'-O-methylcytidine-3'-phosphorothioate
  modified_base 3: mod_base = OTHER; note = 2'-O-methyladenosine-3'-phosphate
  modified_base 4: mod_base = OTHER; note = 2'-O-methyluridine-3'-phosphate
  modified_base 5: mod_base = OTHER; note = 2'-O-methylcytidine-3'-phosphate
  modified_base 6: mod_base = OTHER; note = 2'-fluorocytidine-3'-phosphate
  modified_base 7: mod_base = OTHER; note = 2'-O-methyladenosine-3'-phosphate
  modified_base 8: mod_base = OTHER; note = 2'-fluorocytidine-3'-phosphate
  modified_base 9: mod_base = OTHER; note = 2'-fluoroadenosine-3'-phosphate
  modified_base 10: mod_base = OTHER; note = 2'-fluoroadenosine-3'-phosphate
  modified_base 11: mod_base = OTHER; note = 2'-fluorouridine-3'-phosphate
  modified_base 12: mod_base = OTHER; note = 2'-O-methylguanosine-3'-phosphate
  modified_base 13: mod_base = OTHER; note = 2'-O-methyladenosine-3'-phosphate
  modified_base 14: mod_base = OTHER; note = 2'-O-methylguanosine-3'-phosphate
  modified_base 15: mod_base = OTHER; note = 2'-O-methyladenosine-3'-phosphate
  modified_base 16: mod_base = OTHER; note = 2'-O-methylguanosine-3'-phosphate
  modified_base 17: mod_base = OTHER; note = 2'-O-methyluridine-3'-phosphate
  modified_base 18: mod_base = OTHER; note = 2'-O-methyladenosine-3'-phosphorothioate
  modified_base 19: mod_base = OTHER; note = 2'-O-methylcytidine-3'-phosphorothioate
  modified_base 20: mod_base = OTHER; note = 2'-O-methyladenosine
tcatccacaatgagagtaca

SEQ ID NO: 2568 - RNA, 20 nt, synthetic construct
  source 1..20: mol_type = other RNA
  modified_base 1: mod_base = OTHER; note = 2'-O-methyluridine-3'-phosphorothioate
  modified_base 2: mod_base = OTHER; note = 2'-O-methylcytidine-3'-phosphorothioate
  modified_base 3: mod_base = OTHER; note = 2'-O-methyladenosine-3'-phosphate
  modified_base 4: mod_base = OTHER; note = 2'-O-methyluridine-3'-phosphate
  modified_base 5: mod_base = OTHER; note = 2'-O-methylcytidine-3'-phosphate
  modified_base 6: mod_base = OTHER; note = 2'-fluorocytidine-3'-phosphate
  modified_base 7: mod_base = OTHER; note = 2'-O-methyladenosine-3'-phosphate
  modified_base 8: mod_base = OTHER; note = 2'-fluorocytidine-3'-phosphate
  modified_base 9: mod_base = OTHER; note = 2'-fluoroadenosine-3'-phosphate
  modified_base 10: mod_base = OTHER; note = 2'-fluoroadenosine-3'-phosphate
  modified_base 11: mod_base = OTHER; note = 2'-fluorouridine-3'-phosphate
  modified_base 12: mod_base = OTHER; note = 2'-O-methylguanosine-3'-phosphate
  modified_base 13: mod_base = OTHER; note = 2'-O-methyladenosine-3'-phosphate
  modified_base 14: mod_base = OTHER; note = 2'-O-methylguanosine-3'-phosphate
  modified_base 15: mod_base = OTHER; note = 2'-O-methyladenosine-3'-phosphate
  modified_base 16: mod_base = OTHER; note = 2'-O-methylguanosine-3'-phosphate
  modified_base 17: mod_base = OTHER; note = 2'-O-methyluridine-3'-phosphate
  modified_base 18: mod_base = OTHER; note = 2'-O-methyladenosine-3'-phosphorothioate
  modified_base 19: mod_base = OTHER; note = 2'-O-methylcytidine-3'-phosphorothioate
  modified_base 20: mod_base = OTHER; note = 2'-O-methyladenosine
tcatccacaatgagagtaca

SEQ ID NO: 2569 - RNA, 20 nt, synthetic construct
  source 1..20: mol_type = other RNA
  modified_base 1: mod_base = OTHER; note = 2'-O-methyluridine-3'-phosphorothioate
  modified_base 2: mod_base = OTHER; note = 2'-O-methylcytidine-3'-phosphorothioate
  modified_base 3: mod_base = OTHER; note = 2'-O-methyladenosine-3'-phosphate
  modified_base 4: mod_base = OTHER; note = 2'-O-methyluridine-3'-phosphate
  modified_base 5: mod_base = OTHER; note = 2'-O-methylcytidine-3'-phosphate
  modified_base 6: mod_base = OTHER; note = 2'-fluorocytidine-3'-phosphate
  modified_base 7: mod_base = OTHER; note = 2'-O-methyladenosine-3'-phosphate
  modified_base 8: mod_base = OTHER; note = 2'-fluorocytidine-3'-phosphate
  modified_base 9: mod_base = OTHER; note = 2'-fluoroadenosine-3'-phosphate
  modified_base 10: mod_base = OTHER; note = 2'-fluoroadenosine-3'-phosphate
  modified_base 11: mod_base = OTHER; note = 2'-fluorouridine-3'-phosphate
  modified_base 12: mod_base = OTHER; note = 2'-O-methylguanosine-3'-phosphate
  modified_base 13: mod_base = OTHER; note = 2'-O-methyladenosine-3'-phosphate
  modified_base 14: mod_base = OTHER; note = 2'-O-methylguanosine-3'-phosphate
  modified_base 15: mod_base = OTHER; note = 2'-O-methyladenosine-3'-phosphate
  modified_base 16: mod_base = OTHER; note = 2'-O-methylguanosine-3'-phosphate
  modified_base 17: mod_base = OTHER; note = 2'-O-methyluridine-3'-phosphate
  modified_base 18: mod_base = OTHER; note = 2'-O-methyladenosine-3'-phosphorothioate
  modified_base 19: mod_base = OTHER; note = 2'-O-methylcytidine-3'-phosphorothioate
  modified_base 20: mod_base = OTHER; note = 2'-O-methyladenosine
tcatccacaatgagagtaca

SEQ ID NO: 2570 - RNA, 22 nt, synthetic construct
  source 1..22: mol_type = other RNA
  modified_base 1: mod_base = OTHER; note = 5'-Mono methyl protected phosphate mimic modified 2'-O-methyluridine-3'-phosphorothioate
  modified_base 2: mod_base = OTHER; note = 2'-fluorocytidine-3'-phosphorothioate
  modified_base 3: mod_base = OTHER; note = 2'-fluoroadenosine-3'-phosphate
  modified_base 4: mod_base = OTHER; note = 2'-O-methyladenosine-3'-phosphate
  modified_base 5: mod_base = OTHER; note = 2'-fluoroadenosine-3'-phosphate
  modified_base 6: mod_base = OTHER; note = 2'-O-methyladenosine-3'-phosphate
  modified_base 7: mod_base = OTHER; note = 2'-fluoroadenosine-3'-phosphate
  modified_base 8: mod_base = OTHER; note = 2'-O-methyladenosine-3'-phosphate
  modified_base 9: mod_base = OTHER; note = 2'-O-methyladenosine-3'-phosphate
  modified_base 10: mod_base = OTHER; note = 2'-fluoroadenosine-3'-phosphate
  modified_base 11: mod_base = OTHER; note = 2'-O-methoxyethyl(MOE)-thymidine(or 5-methyluridine)-3'-phosphate
  modified_base 12: mod_base = OTHER; note = 2'-O-methylguanosine-3'-phosphate
  modified_base 13: mod_base = OTHER; note = 2'-O-methylcytidine-3'-phosphate
  modified_base 14: mod_base = OTHER; note = 2'-fluorouridine-3'-phosphate
  modified_base 15: mod_base = OTHER; note = 2'-O-methylguanosine-3'-phosphate
  modified_base 16: mod_base = OTHER; note = 2'-fluorouridine-3'-phosphate
  modified_base 17: mod_base = OTHER; note = 2'-O-methyluridine-3'-phosphate
  modified_base 18: mod_base = OTHER; note = 2'-O-methylcytidine-3'-phosphate
  modified_base 19: mod_base = OTHER; note = 2'-O-methyladenosine-3'-phosphate
  modified_base 20: mod_base = OTHER; note = 2'-O-methylguanosine-3'-phosphorothioate
  modified_base 21: mod_base = OTHER; note = 2'-O-methylcytidine-3'-phosphorothioate
  modified_base 22: mod_base = OTHER; note = 2'-O-methyladenosine
tcaaaaaaaatgctgttcagca

SEQ ID NO: 2571 - RNA, 22 nt, synthetic construct
  source 1..22: mol_type = other RNA
  modified_base 1: mod_base = OTHER; note = 5'-Mono methyl protected phosphate mimic modified 2'-O-methyluridine-3'-phosphorothioate
  modified_base 2: mod_base = OTHER; note = 2'-fluorocytidine-3'-phosphorothioate
  modified_base 3: mod_base = OTHER; note = 2'-fluoroadenosine-3'-phosphate
  modified_base 4: mod_base = OTHER; note = 2'-O-methylcytidine-3'-phosphate
  modified_base 5: mod_base = OTHER; note = 2'-fluorouridine-3'-phosphate
  modified_base 6: mod_base = OTHER; note = 2'-O-methyluridine-3'-phosphate
  modified_base 7: mod_base = OTHER; note = 2'-fluorouridine-3'-phosphate
  modified_base 8: mod_base = OTHER; note = 2'-O-methyluridine-3'-phosphate
  modified_base 9: mod_base = OTHER; note = 2'-O-methyluridine-3'-phosphate
  modified_base 10: mod_base = OTHER; note = 2'-fluorouridine-3'-phosphate
  modified_base 11: mod_base = OTHER; note = 2'-O-methylguanosine-3'-phosphate
  modified_base 12: mod_base = OTHER; note = 2'-O-methyluridine-3'-phosphate
  modified_base 13: mod_base = OTHER; note = 2'-O-methyluridine-3'-phosphate
  modified_base 14: mod_base = OTHER; note = 2'-fluorouridine-3'-phosphate
  modified_base 15: mod_base = OTHER; note = 2'-O-methylcytidine-3'-phosphate
  modified_base 16: mod_base = OTHER; note = 2'-fluoroadenosine-3'-phosphate
  modified_base 17: mod_base = OTHER; note = 2'-O-methylcytidine-3'-phosphate
  modified_base 18: mod_base = OTHER; note = 2'-O-methyladenosine-3'-phosphate
  modified_base 19: mod_base = OTHER; note = 2'-O-methyladenosine-3'-phosphate
  modified_base 20: mod_base = OTHER; note = 2'-O-methyladenosine-3'-phosphorothioate
  modified_base 21: mod_base = OTHER; note = 2'-O-methylcytidine-3'-phosphorothioate
  modified_base 22: mod_base = OTHER; note = 2'-O-methyladenosine
tcacttttttgtttcacaaaca

SEQ ID NO: 2572 - RNA, 22 nt, synthetic construct
  source 1..22: mol_type = other RNA
  modified_base 1: mod_base = OTHER; note = 5'-Mono methyl protected phosphate mimic modified 2'-O-methyluridine-3'-phosphorothioate
  modified_base 2: mod_base = OTHER; note = 2'-fluoroguanosine-3'-phosphorothioate
  modified_base 3: mod_base = OTHER; note = 2'-fluoroguanosine-3'-phosphate
  modified_base 4: mod_base = OTHER; note = 2'-O-methyladenosine-3'-phosphate
  modified_base 5: mod_base = OTHER; note = 2'-fluoroadenosine-3'-phosphate
  modified_base 6: mod_base = OTHER; note = 2'-O-methylcytidine-3'-phosphate
  modified_base 7: mod_base = OTHER; note = 2'-fluoroadenosine-3'-phosphate
  modified_base 8: mod_base = OTHER; note = 2'-O-methylcytidine-3'-phosphate
  modified_base 9: mod_base = OTHER; note = 2'-O-methyluridine-3'-phosphate
  modified_base 10: mod_base = OTHER; note = 2'-fluorouridine-3'-phosphate
  modified_base 11: mod_base = OTHER; note = 2'-O-methyluridine-3'-phosphate
  modified_base 12: mod_base = OTHER; note = 2'-O-methyluridine-3'-phosphate
  modified_base 13: mod_base = OTHER; note = 2'-O-methyluridine-3'-phosphate
  modified_base 14: mod_base = OTHER; note = 2'-fluorouridine-3'-phosphate
  modified_base 15: mod_base = OTHER; note = 2'-O-methylguanosine-3'-phosphate
  modified_base 16: mod_base = OTHER; note = 2'-fluorouridine-3'-phosphate
  modified_base 17: mod_base = OTHER; note = 2'-O-methyluridine-3'-phosphate
  modified_base 18: mod_base = OTHER; note = 2'-O-methyluridine-3'-phosphate
  modified_base 19: mod_base = OTHER; note = 2'-O-methylcytidine-3'-phosphate
  modified_base 20: mod_base = OTHER; note = 2'-O-methyladenosine-3'-phosphorothioate
  modified_base 21: mod_base = OTHER; note = 2'-O-methylcytidine-3'-phosphorothioate
  modified_base 22: mod_base = OTHER; note = 2'-O-methyladenosine
tggaacacttttttgtttcaca

SEQ ID NO: 2573 - RNA, 22 nt, synthetic construct
  source 1..22: mol_type = other RNA
  modified_base 1: mod_base = OTHER; note = 5'-Mono methyl protected phosphate mimic modified 2'-O-methyluridine-3'-phosphorothioate
  modified_base 2: mod_base = OTHER; note = 2'-fluorouridine-3'-phosphorothioate
  modified_base 3: mod_base = OTHER; note = 2'-fluorouridine-3'-phosphate
  modified_base 4: mod_base = OTHER; note = 2'-O-methylguanosine-3'-phosphate
  modified_base 5: mod_base = OTHER; note = 2'-fluoroadenosine-3'-phosphate
  modified_base 6: mod_base = OTHER; note = 2'-O-methyladenosine-3'-phosphate
  modified_base 7: mod_base = OTHER; note = 2'-fluoroadenosine-3'-phosphate
  modified_base 8: mod_base = OTHER; note = 2'-O-methyladenosine-3'-phosphate
  modified_base 9: mod_base = OTHER; note = 2'-O-methylguanosine-3'-phosphate
  modified_base 10: mod_base = OTHER; note = 2'-fluoroguanosine-3'-phosphate
  modified_base 11: mod_base = OTHER; note = 2'-O-methylguanosine-3'-phosphate
  modified_base 12: mod_base = OTHER; note = 2'-O-methyladenosine-3'-phosphate
  modified_base 13: mod_base = OTHER; note = 2'-O-methyladenosine-3'-phosphate
  modified_base 14: mod_base = OTHER; note = 2'-fluorocytidine-3'-phosphate
  modified_base 15: mod_base = OTHER; note = 2'-O-methyladenosine-3'-phosphate
  modified_base 16: mod_base = OTHER; note = 2'-fluorocytidine-3'-phosphate
  modified_base 17: mod_base = OTHER; note = 2'-O-methyluridine-3'-phosphate
  modified_base 18: mod_base = OTHER; note = 2'-O-methyluridine-3'-phosphate
  modified_base 19: mod_base = OTHER; note = 2'-O-methyluridine-3'-phosphate
  modified_base 20: mod_base = OTHER; note = 2'-O-methyluridine-3'-phosphorothioate
  modified_base 21: mod_base = OTHER; note = 2'-O-methyluridine-3'-phosphorothioate
  modified_base 22: mod_base = OTHER; note = 2'-O-methyluridine
tttgaaaagggaacactttttt

SEQ ID NO: 2574 - RNA, 22 nt, synthetic construct
  source 1..22: mol_type = other RNA
  modified_base 1: mod_base = OTHER; note = 5'-Mono methyl protected phosphate mimic modified 2'-O-methyluridine-3'-phosphorothioate
  modified_base 2: mod_base = OTHER; note = 2'-fluorocytidine-3'-phosphorothioate
  modified_base 3: mod_base = OTHER; note = 2'-fluoroadenosine-3'-phosphate
  modified_base 4: mod_base = OTHER; note = 2'-O-methyladenosine-3'-phosphate
  modified_base 5: mod_base = OTHER; note = 2'-fluorouridine-3'-phosphate
  modified_base 6: mod_base = OTHER; note = 2'-O-methyluridine-3'-phosphate
  modified_base 7: mod_base = OTHER; note = 2'-fluorouridine-3'-phosphate
  modified_base 8: mod_base = OTHER; note = 2'-O-methyluridine-3'-phosphate
  modified_base 9: mod_base = OTHER; note = 2'-O-methyluridine-3'-phosphate
  modified_base 10: mod_base = OTHER; note = 2'-fluoroguanosine-3'-phosphate
  modified_base 11: mod_base = OTHER; note = 2'-O-methyluridine-3'-phosphate
  modified_base 12: mod_base = OTHER; note = 2'-O-methyluridine-3'-phosphate
  modified_base 13: mod_base = OTHER; note = 2'-O-methylcytidine-3'-phosphate
  modified_base 14: mod_base = OTHER; note = 2'-fluorouridine-3'-phosphate
  modified_base 15: mod_base = OTHER; note = 2'-O-methylcytidine-3'-phosphate
  modified_base 16: mod_base = OTHER; note = 2'-fluoroadenosine-3'-phosphate
  modified_base 17: mod_base = OTHER; note = 2'-O-methyladenosine-3'-phosphate
  modified_base 18: mod_base = OTHER; note = 2'-O-methylcytidine-3'-phosphate
  modified_base 19: mod_base = OTHER; note = 2'-O-methyluridine-3'-phosphate
  modified_base 20: mod_base = OTHER; note = 2'-O-methyluridine-3'-phosphorothioate
  modified_base 21: mod_base = OTHER; note = 2'-O-methylguanosine-3'-phosphorothioate
  modified_base 22: mod_base = OTHER; note = 2'-O-methyladenosine
tcaatttttgttctcaacttga

SEQ ID NO: 2575 - RNA, 22 nt, synthetic construct
  source 1..22: mol_type = other RNA
  modified_base 1: mod_base = OTHER; note = 5'-Mono methyl protected phosphate mimic modified 2'-O-methyluridine-3'-phosphorothioate
  modified_base 2: mod_base = OTHER; note = 2'-fluoroadenosine-3'-phosphorothioate
  modified_base 3: mod_base = OTHER; note = 2'-fluoroadenosine-3'-phosphate
  modified_base 4: mod_base = OTHER; note = 2'-O-methyladenosine-3'-phosphate
  modified_base 5: mod_base = OTHER; note = 2'-fluoroadenosine-3'-phosphate
  modified_base 6: mod_base = OTHER; note = 2'-O-methylcytidine-3'-phosphate
  modified_base 7: mod_base = OTHER; note = 2'-fluorocytidine-3'-phosphate
  modified_base 8: mod_base = OTHER; note = 2'-O-methylcytidine-3'-phosphate
  modified_base 9: mod_base = OTHER; note = 2'-O-methyladenosine-3'-phosphate
  modified_base 10: mod_base = OTHER; note = 2'-fluoroadenosine-3'-phosphate
  modified_base 11: mod_base = OTHER; note = 2'-O-methyluridine-3'-phosphate
  modified_base 12: mod_base = OTHER; note = 2'-O-methyluridine-3'-phosphate
  modified_base 13: mod_base = OTHER; note = 2'-O-methyluridine-3'-phosphate
  modified_base 14: mod_base = OTHER; note = 2'-fluorouridine-3'-phosphate
  modified_base 15: mod_base = OTHER; note = 2'-O-methyluridine-3'-phosphate
  modified_base 16: mod_base = OTHER; note = 2'-fluoroguanosine-3'-phosphate
  modified_base 17: mod_base = OTHER; note = 2'-O-methyluridine-3'-phosphate
  modified_base 18: mod_base = OTHER; note = 2'-O-methyluridine-3'-phosphate
  modified_base 19: mod_base = OTHER; note = 2'-O-methylcytidine-3'-phosphate
  modified_base 20: mod_base = OTHER; note = 2'-O-methyluridine-3'-phosphorothioate
  modified_base 21: mod_base = OTHER; note = 2'-O-methylcytidine-3'-phosphorothioate
  modified_base 22: mod_base = OTHER; note = 2'-O-methyladenosine
taaaacccaatttttgttctca

SEQ ID NO: 2576 - RNA, 22 nt, synthetic construct
  source 1..22: mol_type = other RNA
  modified_base 1: mod_base = OTHER; note = 5'-Mono methyl protected phosphate mimic modified 2'-O-methyluridine-3'-phosphorothioate
  modified_base 2: mod_base = OTHER; note = 2'-fluoroadenosine-3'-phosphorothioate
  modified_base 3: mod_base = OTHER; note = 2'-fluorouridine-3'-phosphate
  modified_base 4: mod_base = OTHER; note = 2'-O-methyluridine-3'-phosphate
  modified_base 5: mod_base = OTHER; note = 2'-O-methyluridine-3'-phosphate
  modified_base 6: mod_base = OTHER; note = 2'-O-methyluridine-3'-phosphate
  modified_base 7: mod_base = OTHER; note = 2'-fluoroadenosine-3'-phosphate
  modified_base 8: mod_base = OTHER; note = 2'-O-methyladenosine-3'-phosphate
  modified_base 9: mod_base = OTHER; note = 2'-O-methyladenosine-3'-phosphate
  modified_base 10: mod_base = OTHER; note = 2'-fluoroadenosine-3'-phosphate
  modified_base 11: mod_base = OTHER; note = 2'-O-methylcytidine-3'-phosphate
  modified_base 12: mod_base = OTHER; note = 2'-O-methylcytidine-3'-phosphate
  modified_base 13: mod_base = OTHER; note = 2'-O-methylcytidine-3'-phosphate
  modified_base 14: mod_base = OTHER; note = 2'-fluoroadenosine-3'-phosphate
  modified_base 15: mod_base = OTHER; note = 2'-O-methyladenosine-3'-phosphate
  modified_base 16: mod_base = OTHER; note = 2'-fluorouridine-3'-phosphate
  modified_base 17: mod_base = OTHER; note = 2'-O-methyluridine-3'-phosphate
  modified_base 18: mod_base = OTHER; note = 2'-O-methyluridine-3'-phosphate
  modified_base 19: mod_base = OTHER; note = 2'-O-methyluridine-3'-phosphate
  modified_base 20: mod_base = OTHER; note = 2'-O-methyluridine-3'-phosphorothioate
  modified_base 21: mod_base = OTHER; note = 2'-O-methylguanosine-3'-phosphorothioate
  modified_base 22: mod_base = OTHER; note = 2'-O-methyluridine
tattttaaaacccaatttttgt

SEQ ID NO: 2577 - RNA, 22 nt, synthetic construct
  source 1..22: mol_type = other RNA
  modified_base 1: mod_base = OTHER; note = 5'-Mono methyl protected phosphate mimic modified 2'-O-methyluridine-3'-phosphorothioate
  modified_base 2: mod_base = OTHER; note = 2'-fluoroadenosine-3'-phosphorothioate
  modified_base 3: mod_base = OTHER; note = 2'-fluorouridine-3'-phosphate
  modified_base 4: mod_base = OTHER; note = 2'-O-methyladenosine-3'-phosphate
  modified_base 5: mod_base = OTHER; note = 2'-fluorocytidine-3'-phosphate
  modified_base 6: mod_base = OTHER; note = 2'-O-methyluridine-3'-phosphate
  modified_base 7: mod_base = OTHER; note = 2'-fluorouridine-3'-phosphate
  modified_base 8: mod_base = OTHER; note = 2'-O-methyluridine-3'-phosphate
  modified_base 9: mod_base = OTHER; note = 2'-O-methyladenosine-3'-phosphate
  modified_base 10: mod_base = OTHER; note = 2'-fluoroadenosine-3'-phosphate
  modified_base 11: mod_base = OTHER; note = 2'-O-methyluridine-3'-phosphate
  modified_base 12: mod_base = OTHER; note = 2'-O-methyluridine-3'-phosphate
  modified_base 13: mod_base = OTHER; note = 2'-O-methyluridine-3'-phosphate
  modified_base 14: mod_base = OTHER; note = 2'-fluorouridine-3'-phosphate
  modified_base 15: mod_base = OTHER; note = 2'-O-methyladenosine-3'-phosphate
  modified_base 16: mod_base = OTHER; note = 2'-fluoroadenosine-3'-phosphate
  modified_base 17: mod_base = OTHER; note = 2'-O-methyladenosine-3'-phosphate
  modified_base 18: mod_base = OTHER; note = 2'-O-methyladenosine-3'-phosphate
  modified_base 19: mod_base = OTHER; note = 2'-O-methylcytidine-3'-phosphate
  modified_base 20: mod_base = OTHER; note = 2'-O-methylcytidine-3'-phosphorothioate
  modified_base 21: mod_base = OTHER; note = 2'-O-methylcytidine-3'-phosphorothioate
  modified_base 22: mod_base = OTHER; note = 2'-O-methyladenosine
tatactttaattttaaaaccca

SEQ ID NO: 2578 - RNA, 22 nt, synthetic construct
  source 1..22: mol_type = other RNA
  modified_base 1: mod_base = OTHER; note = 5'-Mono methyl protected phosphate mimic modified 2'-O-methyluridine-3'-phosphorothioate
  modified_base 2: mod_base = OTHER; note = 2'-fluorouridine-3'-phosphorothioate
  modified_base 3: mod_base = OTHER; note = 2'-fluoroadenosine-3'-phosphate
  modified_base 4: mod_base = OTHER; note = 2'-O-methyluridine-3'-phosphate
  modified_base 5: mod_base = OTHER; note = 2'-fluoroadenosine-3'-phosphate
  modified_base 6: mod_base = OTHER; note = 2'-O-methylcytidine-3'-phosphate
  modified_base 7: mod_base = OTHER; note = 2'-fluorouridine-3'-phosphate
  modified_base 8: mod_base = OTHER; note = 2'-O-methyluridine-3'-phosphate
  modified_base 9: mod_base = OTHER; note = 2'-O-methyluridine-3'-phosphate
  modified_base 10: mod_base = OTHER; note = 2'-fluoroadenosine-3'-phosphate
  modified_base 11: mod_base = OTHER; note = 2'-O-methyladenosine-3'-phosphate
  modified_base 12: mod_base = OTHER; note = 2'-O-methyluridine-3'-phosphate
  modified_base 13: mod_base = OTHER; note = 2'-O-methyluridine-3'-phosphate
  modified_base 14: mod_base = OTHER; note = 2'-fluorouridine-3'-phosphate
  modified_base 15: mod_base = OTHER; note = 2'-O-methyluridine-3'-phosphate
  modified_base 16: mod_base = OTHER; note = 2'-fluoroadenosine-3'-phosphate
  modified_base 17: mod_base = OTHER; note = 2'-O-methyladenosine-3'-phosphate
  modified_base 18: mod_base = OTHER; note = 2'-O-methyladenosine-3'-phosphate
  modified_base 19: mod_base = OTHER; note = 2'-O-methyladenosine-3'-phosphate
  modified_base 20: mod_base = OTHER; note = 2'-O-methylcytidine-3'-phosphorothioate
  modified_base 21: mod_base = OTHER; note = 2'-O-methylcytidine-3'-phosphorothioate
  modified_base 22: mod_base = OTHER; note = 2'-O-methylcytidine
ttatactttaattttaaaaccc

SEQ ID NO: 2579 - RNA, 22 nt, synthetic construct
  source 1..22: mol_type = other RNA
  modified_base 1: mod_base = OTHER; note = 2'-O-methyluridine-3'-phosphorothioate
  modified_base 2: mod_base = OTHER; note = 2'-fluoroguanosine-3'-phosphorothioate
  modified_base 3: mod_base = OTHER; note = 2'-fluorouridine-3'-phosphate
  modified_base 4: mod_base = OTHER; note = 2'-O-methyladenosine-3'-phosphate
  modified_base 5: mod_base = OTHER; note = 2'-fluorocytidine-3'-phosphate
  modified_base 6: mod_base = OTHER; note = 2'-O-methyluridine-3'-phosphate
  modified_base 7: mod_base = OTHER; note = 2'-fluorocytidine-3'-phosphate
  modified_base 8: mod_base = OTHER; note = 2'-O-methyluridine-3'-phosphate
  modified_base 9: mod_base = OTHER; note = 2'-O-methylcytidine-3'-phosphate
  modified_base 10: mod_base = OTHER; note = 2'-fluoroadenosine-3'-phosphate
  modified_base 11: mod_base = OTHER; note = 2'-O-methyluridine-3'-phosphate
  modified_base 12: mod_base = OTHER; note = 2'-O-methyluridine-3'-phosphate
  modified_base 13: mod_base = OTHER; note = 2'-O-methylguanosine-3'-phosphate
  modified_base 14: mod_base = OTHER; note = 2'-fluorouridine-3'-phosphate
  modified_base 15: mod_base = OTHER; note = 2'-O-methylguanosine-3'-phosphate
  modified_base 16: mod_base = OTHER; note = 2'-fluoroguanosine-3'-phosphate
  modified_base 17: mod_base = OTHER; note = 2'-O-methyladenosine-3'-phosphate
  modified_base 18: mod_base = OTHER; note = 2'-O-methyluridine-3'-phosphate
  modified_base 19: mod_base = OTHER; note = 2'-O-methylguanosine-3'-phosphate
  modified_base 20: mod_base = OTHER; note = 2'-O-methyladenosine-3'-phosphorothioate
  modified_base 21: mod_base = OTHER; note = 2'-O-methylcytidine-3'-phosphorothioate
  modified_base 22: mod_base = OTHER; note = 2'-O-methylguanosine
tgtactctcattgtggatgacg

SEQ ID NO: 2580 - RNA, 22 nt, synthetic construct
  source 1..22: mol_type = other RNA
  modified_base 1: mod_base = OTHER; note = 5'-Phosphate mimic modified 2'-O-methyluridine-3'-phosphorothioate
  modified_base 2: mod_base = OTHER; note = 2'-fluoroguanosine-3'-phosphorothioate
  modified_base 3: mod_base = OTHER; note = 2'-fluorouridine-3'-phosphate
  modified_base 4: mod_base = OTHER; note = 2'-O-methyladenosine-3'-phosphate
  modified_base 5: mod_base = OTHER; note = 2'-fluorocytidine-3'-phosphate
  modified_base 6: mod_base = OTHER; note = 2'-O-methyluridine-3'-phosphate
  modified_base 7: mod_base = OTHER; note = 2'-fluorocytidine-3'-phosphate
  modified_base 8: mod_base = OTHER; note = 2'-O-methyluridine-3'-phosphate
  modified_base 9: mod_base = OTHER; note = 2'-O-methylcytidine-3'-phosphate
  modified_base 10: mod_base = OTHER; note = 2'-fluoroadenosine-3'-phosphate
  modified_base 11: mod_base = OTHER; note = 2'-O-methyluridine-3'-phosphate
  modified_base 12: mod_base = OTHER; note = 2'-O-methyluridine-3'-phosphate
  modified_base 13: mod_base = OTHER; note = 2'-O-methylguanosine-3'-phosphate
  modified_base 14: mod_base = OTHER; note = 2'-fluorouridine-3'-phosphate
  modified_base 15: mod_base = OTHER; note = 2'-O-methylguanosine-3'-phosphate
  modified_base 16: mod_base = OTHER; note = 2'-fluoroguanosine-3'-phosphate
  modified_base 17: mod_base = OTHER; note = 2'-O-methyladenosine-3'-phosphate
  modified_base 18: mod_base = OTHER; note = 2'-O-methyluridine-3'-phosphate
  modified_base 19: mod_base = OTHER; note = 2'-O-methylguanosine-3'-phosphate
  modified_base 20: mod_base = OTHER; note = 2'-O-methyladenosine-3'-phosphorothioate
  modified_base 21: mod_base = OTHER; note = 2'-O-methylcytidine-3'-phosphorothioate
  modified_base 22: mod_base = OTHER; note = 2'-O-methylguanosine
tgtactctcattgtggatgacg

SEQ ID NO: 2581 - RNA, 22 nt, synthetic construct
  source 1..22: mol_type = other RNA
  modified_base 1: mod_base = OTHER; note = 5'-Mono methyl protected phosphate mimic modified 2'-O-methyluridine-3'-phosphorothioate
  modified_base 2: mod_base = OTHER; note = 2'-fluoroguanosine-3'-phosphorothioate
  modified_base 3: mod_base = OTHER; note = 2'-fluorouridine-3'-phosphate
  modified_base 4: mod_base = OTHER; note = 2'-O-methyladenosine-3'-phosphate
  modified_base 5: mod_base = OTHER; note = 2'-fluorocytidine-3'-phosphate
  modified_base 6: mod_base = OTHER; note = 2'-O-methyluridine-3'-phosphate
  modified_base 7: mod_base = OTHER; note = 2'-fluorocytidine-3'-phosphate
  modified_base 8: mod_base = OTHER; note = 2'-O-methyluridine-3'-phosphate
  modified_base 9: mod_base = OTHER; note = 2'-O-methylcytidine-3'-phosphate
  modified_base 10: mod_base = OTHER; note = 2'-fluoroadenosine-3'-phosphate
  modified_base 11: mod_base = OTHER; note = 2'-O-methyluridine-3'-phosphate
  modified_base 12: mod_base = OTHER; note = 2'-O-methyluridine-3'-phosphate
  modified_base 13: mod_base = OTHER; note = 2'-O-methylguanosine-3'-phosphate
  modified_base 14: mod_base = OTHER; note = 2'-fluorouridine-3'-phosphate
  modified_base 15: mod_base = OTHER; note = 2'-O-methylguanosine-3'-phosphate
  modified_base 16: mod_base = OTHER; note = 2'-fluoroguanosine-3'-phosphate
  modified_base 17: mod_base = OTHER; note = 2'-O-methyladenosine-3'-phosphate
  modified_base 18: mod_base = OTHER; note = 2'-O-methyluridine-3'-phosphate
  modified_base 19: mod_base = OTHER; note = 2'-O-methylguanosine-3'-phosphate
  modified_base 20: mod_base = OTHER; note = 2'-O-methyladenosine-3'-phosphorothioate
  modified_base 21: mod_base = OTHER; note = 2'-O-methylcytidine-3'-phosphorothioate
  modified_base 22: mod_base = OTHER; note = 2'-O-methylguanosine
tgtactctcattgtggatgacg

SEQ ID NO: 2582 - RNA, 21 nt, synthetic construct
  source 1..21: mol_type = other RNA
  modified_base 1: mod_base = OTHER; note = 2'-O-methylcytidine-3'-phosphorothioate
  modified_base 2: mod_base = OTHER; note = 2'-O-methyluridine-3'-phosphate
  modified_base 3: mod_base = OTHER; note = 2'-O-methylguanosine-3'-phosphate
  modified_base 4: mod_base = OTHER; note = 2'-O-methyluridine-3'-phosphate
  modified_base 5: mod_base = OTHER; note = 2'-O-methyluridine-3'-phosphate
  modified_base 6: mod_base = OTHER; note = 2'-O-methylcytidine-3'-phosphate
  modified_base 7: mod_base = OTHER; note = 2'-O-methylcytidine-3'-phosphate
  modified_base 8: mod_base = OTHER; note = 2'-O-methyladenosine-3'-phosphate
  modified_base 9: mod_base = OTHER; note = 2'-fluoroadenosine-3'-phosphate
  modified_base 10: mod_base = OTHER; note = 2'-fluoroadenosine-3'-phosphate
  modified_base 11: mod_base = OTHER; note = 2'-fluoroadenosine-3'-phosphate
  modified_base 12: mod_base = OTHER; note = 2'-O-methyladenosine-3'-phosphate
  modified_base 13: mod_base = OTHER; note = 2'-O-methylguanosine-3'-phosphate
  modified_base 14: mod_base = OTHER; note = 2'-O-methyladenosine-3'-phosphate
  modified_base 15: mod_base = OTHER; note = 2'-O-methyladenosine-3'-phosphate
  modified_base 16: mod_base = OTHER; note = 2'-O-methyluridine-3'-phosphate
  modified_base 17: mod_base = OTHER; note = 2'-O-methyluridine-3'-phosphate
  modified_base 18: mod_base = OTHER; note = 2'-O-methylcytidine-3'-phosphate
  modified_base 19: mod_base = OTHER; note = 2'-O-methylcytidine-3'-phosphate
  modified_base 20: mod_base = OTHER; note = 2'-O-methyladenosine-3'-phosphate
  modified_base 21: mod_base = OTHER; note = 2'-O-methyladenosine
  misc_feature 1: note = Nucleotide linked to an inverted deoxythymidine via a 5'-5'-phosphorothioate linkage
  misc_feature 21: note = Nucleotide linked to an inverted deoxythymidine via a 3'-3'-phosphorothioate linkage
ctgttccaaaaagaattccaa

SEQ ID NO: 2583 - RNA, 21 nt, synthetic construct
  source 1..21: mol_type = other RNA
  modified_base 1: mod_base = OTHER; note = 2'-O-methylcytidine-3'-phosphorothioate
  modified_base 2: mod_base = OTHER; note = 2'-O-methyluridine-3'-phosphate
  modified_base 3: mod_base = OTHER; note = 2'-O-methylguanosine-3'-phosphate
  modified_base 4: mod_base = OTHER; note = 2'-O-methyluridine-3'-phosphate
  modified_base 5: mod_base = OTHER; note = 2'-O-methyluridine-3'-phosphate
  modified_base 6: mod_base = OTHER; note = 2'-O-methylcytidine-3'-phosphate
  modified_base 7: mod_base = OTHER; note = 2'-O-methylcytidine-3'-phosphate
  modified_base 8: mod_base = OTHER; note = 2'-O-methyladenosine-3'-phosphate
  modified_base 9: mod_base = OTHER; note = 2'-fluoroadenosine-3'-phosphate
  modified_base 10: mod_base = OTHER; note = 2'-fluoroadenosine-3'-phosphate
  modified_base 11: mod_base = OTHER; note = 2'-fluoroadenosine-3'-phosphate
  modified_base 12: mod_base = OTHER; note = 2'-O-methyladenosine-3'-phosphate
  modified_base 13: mod_base = OTHER; note = 2'-O-methylguanosine-3'-phosphate
  modified_base 14: mod_base = OTHER; note = 2'-O-methyladenosine-3'-phosphate
  modified_base 15: mod_base = OTHER; note = 2'-O-methyladenosine-3'-phosphate
  modified_base 16: mod_base = OTHER; note = 2'-O-methyluridine-3'-phosphate
  modified_base 17: mod_base = OTHER; note = 2'-O-methyluridine-3'-phosphate
  modified_base 18: mod_base = OTHER; note = 2'-O-methylcytidine-3'-phosphate
  modified_base 19: mod_base = OTHER; note = 2'-O-methylcytidine-3'-phosphate
  modified_base 20: mod_base = OTHER; note = 2'-O-methyladenosine-3'-phosphorothioate
  misc_difference 21: note = Uracil containing any modified sugar
  misc_feature 1: note = Nucleotide linked to an inverted deoxythymidine via a 5'-5'-phosphorothioate linkage
ctgttccaaaaagaattccat

SEQ ID NO: 2584 - RNA, 21 nt, synthetic construct
  source 1..21: mol_type = other RNA
  modified_base 1: mod_base = OTHER; note = 2'-O-methylguanosine-3'-phosphorothioate
  modified_base 2: mod_base = OTHER; note = 2'-O-methylcytidine-3'-phosphate
  modified_base 3: mod_base = OTHER; note = 2'-O-methyluridine-3'-phosphate
  modified_base 4: mod_base = OTHER; note = 2'-O-methylguanosine-3'-phosphate
  modified_base 5: mod_base = OTHER; note = 2'-O-methyladenosine-3'-phosphate
  modified_base 6: mod_base = OTHER; note = 2'-O-methyladenosine-3'-phosphate
  modified_base 7: mod_base = OTHER; note = 2'-O-methylcytidine-3'-phosphate
  modified_base 8: mod_base = OTHER; note = 2'-O-methyladenosine-3'-phosphate
  modified_base 9: mod_base = OTHER; note = 2'-fluoroguanosine-3'-phosphate
  modified_base 10: mod_base = OTHER; note = 2'-fluorocytidine-3'-phosphate
  modified_base 11: mod_base = OTHER; note = 2'-fluoroadenosine-3'-phosphate
  modified_base 12: mod_base = OTHER; note = 2'-O-methylcytidine-3'-phosphate
  modified_base 13: mod_base = OTHER; note = 2'-O-methyluridine-3'-phosphate
  modified_base 14: mod_base = OTHER; note = 2'-O-methyluridine-3'-phosphate
  modified_base 15: mod_base = OTHER; note = 2'-O-methyluridine-3'-phosphate
  modified_base 16: mod_base = OTHER; note = 2'-O-methyluridine-3'-phosphate
  modified_base 17: mod_base = OTHER; note = 2'-O-methyluridine-3'-phosphate
  modified_base 18: mod_base = OTHER; note = 2'-O-methyluridine-3'-phosphate
  modified_base 19: mod_base = OTHER; note = 2'-O-methyluridine-3'-phosphate
  modified_base 20: mod_base = OTHER; note = 2'-O-methylguanosine-3'-phosphate
  modified_base 21: mod_base = OTHER; note = 2'-O-methyladenosine
  misc_feature 1: note = Nucleotide linked to an inverted deoxythymidine via a 5'-5'-phosphorothioate linkage
  misc_feature 21: note = Nucleotide linked to an inverted deoxythymidine via a 3'-3'-phosphorothioate linkage
gctgaacagcactttttttga

SEQ ID NO: 2585 - RNA, 23 nt, synthetic construct
  source 1..23: mol_type = other RNA
  modified_base 1: mod_base = OTHER; note 5'-(E)-vinylphosphonate-2'-O-methyluridine-3'-phosphorothio ate
  modified_base 2: mod_base = OTHER; note = 2'-fluorouridine-3'-phosphorothioate
  modified_base 3: mod_base = OTHER; note = 2'-O-methylguanosine-3'-phosphate
  modified_base 4: mod_base = OTHER; note = 2'-fluoroguanosine-3'-phosphate
  modified_base 5: mod_base = OTHER; note = 2'-O-methyladenosine-3'-phosphate
  modified_base 6: mod_base = OTHER; note = 2'-fluoroadenosine-3'-phosphate
  modified_base 7: mod_base = OTHER; note = 2'-O-methyluridine-3'-phosphate
  modified_base 8: mod_base = OTHER; note = 2'-fluorouridine-3'-phosphate
  modified_base 9: mod_base = OTHER; note = 2'-O-methylcytidine-3'-phosphate
  modified_base 10: mod_base = OTHER; note = 2'-O-methyluridine-3'-phosphate
  modified_base 11: mod_base = OTHER; note = 2'-O-methyluridine-3'-phosphate
  modified_base 12: mod_base = OTHER; note = 2'-O-methyluridine-3'-phosphate
  modified_base 13: mod_base = OTHER; note = 2'-O-methyluridine-3'-phosphate
  modified_base 14: mod_base = OTHER; note = 2'-fluorouridine-3'-phosphate
  modified_base 15: mod_base = OTHER; note = 2'-O-methylguanosine-3'-phosphate
  modified_base 16: mod_base = OTHER; note = 2'-fluoroguanosine-3'-phosphate
  modified_base 17: mod_base = OTHER; note = 2'-O-methyladenosine-3'-phosphate
  modified_base 18: mod_base = OTHER; note = 2'-O-methyladenosine-3'-phosphate
  modified_base 19: mod_base = OTHER; note = 2'-O-methylcytidine-3'-phosphate
  modified_base 20: mod_base = OTHER; note = 2'-O-methyladenosine-3'-phosphate
  modified_base 21: mod_base = OTHER; note = 2'-O-methylguanosine-3'-phosphorothioate
  modified_base 22: mod_base = OTHER; note = 2'-O-methyluridine-3'-phosphorothioate
  modified_base 23: mod_base = OTHER; note = 2'-O-methyladenosine
ttggaattctttttggaacagta

SEQ ID NO: 2586 - RNA, 23 nt, synthetic construct
  source 1..23: mol_type = other RNA
  modified_base 1: mod_base = OTHER; note 5'-(E)-vinylphosphonate-2'-O-methyladenosine-3'-phosphoroth ioate
  modified_base 2: mod_base = OTHER; note = 2'-fluorouridine-3'-phosphorothioate
  modified_base 3: mod_base = OTHER; note = 2'-O-methylguanosine-3'-phosphate
  modified_base 4: mod_base = OTHER; note = 2'-fluoroguanosine-3'-phosphate
  modified_base 5: mod_base = OTHER; note = 2'-O-methyladenosine-3'-phosphate
  modified_base 6: mod_base = OTHER; note = 2'-fluoroadenosine-3'-phosphate
  modified_base 7: mod_base = OTHER; note = 2'-O-methyluridine-3'-phosphate
  modified_base 8: mod_base = OTHER; note = 2'-fluorouridine-3'-phosphate
  modified_base 9: mod_base = OTHER; note = 2'-O-methylcytidine-3'-phosphate
  modified_base 10: mod_base = OTHER; note = 2'-O-methyluridine-3'-phosphate
  modified_base 11: mod_base = OTHER; note = 2'-O-methyluridine-3'-phosphate
  modified_base 12: mod_base = OTHER; note = 2'-O-methyluridine-3'-phosphate
  modified_base 13: mod_base = OTHER; note = 2'-O-methyluridine-3'-phosphate
  modified_base 14: mod_base = OTHER; note = 2'-fluorouridine-3'-phosphate
  modified_base 15: mod_base = OTHER; note = 2'-O-methylguanosine-3'-phosphate
  modified_base 16: mod_base = OTHER; note = 2'-fluoroguanosine-3'-phosphate
  modified_base 17: mod_base = OTHER; note = 2'-O-methyladenosine-3'-phosphate
  modified_base 18: mod_base = OTHER; note = 2'-O-methyladenosine-3'-phosphate
  modified_base 19: mod_base = OTHER; note = 2'-O-methylcytidine-3'-phosphate
  modified_base 20: mod_base = OTHER; note = 2'-O-methyladenosine-3'-phosphate
  modified_base 21: mod_base = OTHER; note = 2'-O-methylguanosine-3'-phosphorothioate
  modified_base 22: mod_base = OTHER; note = 2'-O-methyluridine-3'-phosphorothioate
  modified_base 23: mod_base = OTHER; note = 2'-O-methyladenosine
atggaattctttttggaacagta

SEQ ID NO: 2587 - RNA, 23 nt, synthetic construct
  source 1..23: mol_type = other RNA
  modified_base 1: mod_base = OTHER; note 5'-(E)-vinylphosphonate-2'-O-methyluridine-3'-phosphorothio ate
  modified_base 2: mod_base = OTHER; note = 2'-fluorocytidine-3'-phosphorothioate
  modified_base 3: mod_base = OTHER; note = 2'-O-methyladenosine-3'-phosphate
  modified_base 4: mod_base = OTHER; note = 2'-O-methyladenosine-3'-phosphate
  modified_base 5: mod_base = OTHER; note = 2'-O-methyladenosine-3'-phosphate
  modified_base 6: mod_base = OTHER; note = 2'-O-methyladenosine-3'-phosphate
  modified_base 7: mod_base = OTHER; note = 2'-O-methyladenosine-3'-phosphate
  modified_base 8: mod_base = OTHER; note = 2'-O-methyladenosine-3'-phosphate
  modified_base 9: mod_base = OTHER; note = 2'-O-methyladenosine-3'-phosphate
  modified_base 10: mod_base = OTHER; note = 2'-O-methyladenosine-3'-phosphate
  modified_base 11: mod_base = OTHER; note = 2'-O-methyluridine-3'-phosphate
  modified_base 12: mod_base = OTHER; note = 2'-O-methylguanosine-3'-phosphate
  modified_base 13: mod_base = OTHER; note = 2'-O-methylcytidine-3'-phosphate
  modified_base 14: mod_base = OTHER; note = 2'-fluorouridine-3'-phosphate
  modified_base 15: mod_base = OTHER; note = 2'-O-methylguanosine-3'-phosphate
  modified_base 16: mod_base = OTHER; note = 2'-fluorouridine-3'-phosphate
  modified_base 17: mod_base = OTHER; note = 2'-O-methyluridine-3'-phosphate
  modified_base 18: mod_base = OTHER; note = 2'-O-methylcytidine-3'-phosphate
  modified_base 19: mod_base = OTHER; note = 2'-O-methyladenosine-3'-phosphate
  modified_base 20: mod_base = OTHER; note = 2'-O-methylguanosine-3'-phosphate
  modified_base 21: mod_base = OTHER; note = 2'-O-methylcytidine-3'-phosphorothioate
  modified_base 22: mod_base = OTHER; note = 2'-O-methyladenosine-3'-phosphorothioate
  modified_base 23: mod_base = OTHER; note = 2'-O-methylcytidine
tcaaaaaaaatgctgttcagcac

SEQ ID NO: 2588 - RNA, 21 nt, synthetic construct
  source 1..21: mol_type = other RNA
  modified_base 1: mod_base = OTHER; note = 2'-O-methylcytidine-3'-phosphorothioate
  modified_base 2: mod_base = OTHER; note = 2'-O-methylcytidine-3'-phosphorothioate
  modified_base 3: mod_base = OTHER; note = 2'-O-methyluridine-3'-phosphate
  modified_base 4: mod_base = OTHER; note = 2'-O-methylguanosine-3'-phosphate
  modified_base 5: mod_base = OTHER; note = 2'-O-methyluridine-3'-phosphate
  modified_base 6: mod_base = OTHER; note = 2'-O-methyluridine-3'-phosphate
  modified_base 7: mod_base = OTHER; note = 2'-fluorouridine-3'-phosphate
  modified_base 8: mod_base = OTHER; note = 2'-O-methyladenosine-3'-phosphate
  modified_base 9: mod_base = OTHER; note = 2'-fluorocytidine-3'-phosphate
  modified_base 10: mod_base = OTHER; note = 2'-fluorouridine-3'-phosphate
  modified_base 11: mod_base = OTHER; note = 2'-fluoroguanosine-3'-phosphate
  modified_base 12: mod_base = OTHER; note = 2'-fluorouridine-3'-phosphate
  modified_base 13: mod_base = OTHER; note = 2'-O-methylguanosine-3'-phosphate
  modified_base 14: mod_base = OTHER; note = 2'-O-methyluridine-3'-phosphate
  modified_base 15: mod_base = OTHER; note = 2'-O-methyladenosine-3'-phosphate
  modified_base 16: mod_base = OTHER; note = 2'-O-methyluridine-3'-phosphate
  modified_base 17: mod_base = OTHER; note = 2'-O-methylguanosine-3'-phosphate
  modified_base 18: mod_base = OTHER; note = 2'-O-methyladenosine-3'-phosphate
  modified_base 19: mod_base = OTHER; note = 2'-O-methyluridine-3'-phosphate
  modified_base 20: mod_base = OTHER; note = 2'-O-methylcytidine-3'-phosphorothioate
  modified_base 21: mod_base = OTHER; note = 2'-O-methyladenosine
  misc_feature 21: note = Nucleotide linked to an inverted abasic nucleotide via a 3'-3'-phosphorothioate linkage
cctgtttactgtgtatgatca

SEQ ID NO: 2589 - RNA, 21 nt, synthetic construct
  source 1..21: mol_type = other RNA
  modified_base 1: mod_base = OTHER; note = 2'-O-methyluridine-3'-phosphorothioate
  modified_base 2: mod_base = OTHER; note = 2'-O-methylguanosine-3'-phosphorothioate
  modified_base 3: mod_base = OTHER; note = 2'-O-methyladenosine-3'-phosphate
  modified_base 4: mod_base = OTHER; note = 2'-O-methylcytidine-3'-phosphate
  modified_base 5: mod_base = OTHER; note = 2'-O-methyladenosine-3'-phosphate
  modified_base 6: mod_base = OTHER; note = 2'-O-methylguanosine-3'-phosphate
  modified_base 7: mod_base = OTHER; note = 2'-fluoroguanosine-3'-phosphate
  modified_base 8: mod_base = OTHER; note = 2'-O-methyluridine-3'-phosphate
  modified_base 9: mod_base = OTHER; note = 2'-fluorouridine-3'-phosphate
  modified_base 10: mod_base = OTHER; note = 2'-fluorocytidine-3'-phosphate
  modified_base 11: mod_base = OTHER; note = 2'-fluoroadenosine-3'-phosphate
  modified_base 12: mod_base = OTHER; note = 2'-fluorouridine-3'-phosphate
  modified_base 13: mod_base = OTHER; note = 2'-O-methylguanosine-3'-phosphate
  modified_base 14: mod_base = OTHER; note = 2'-O-methylcytidine-3'-phosphate
  modified_base 15: mod_base = OTHER; note = 2'-O-methyladenosine-3'-phosphate
  modified_base 16: mod_base = OTHER; note = 2'-O-methylguanosine-3'-phosphate
  modified_base 17: mod_base = OTHER; note = 2'-O-methyladenosine-3'-phosphate
  modified_base 18: mod_base = OTHER; note = 2'-O-methylcytidine-3'-phosphate
  modified_base 19: mod_base = OTHER; note = 2'-O-methyluridine-3'-phosphate
  modified_base 20: mod_base = OTHER; note = 2'-O-methylguanosine-3'-phosphorothioate
  modified_base 21: mod_base = OTHER; note = 2'-O-methyluridine
  misc_feature 21: note = Nucleotide linked to an inverted abasic nucleotide via a 3'-3'-phosphorothioate linkage
tgacaggttcatgcagactgt

SEQ ID NO: 2590 - RNA, 22 nt, synthetic construct
  source 1..22: mol_type = other RNA
  modified_base 1: mod_base = OTHER; note = 2'-O-methylcytidine-3'-phosphorothioate
  modified_base 2: mod_base = OTHER; note = 2'-O-methylguanosine-3'-phosphate
  modified_base 3: mod_base = OTHER; note = 2'-O-methyladenosine-3'-phosphate
  modified_base 4: mod_base = OTHER; note = 2'-O-methylcytidine-3'-phosphate
  modified_base 5: mod_base = OTHER; note = 2'-O-methylcytidine-3'-phosphate
  modified_base 6: mod_base = OTHER; note = 2'-O-methyladenosine-3'-phosphate
  modified_base 7: mod_base = OTHER; note = 2'-O-methylguanosine-3'-phosphate
  modified_base 8: mod_base = OTHER; note = 2'-fluorocytidine-3'-phosphate
  modified_base 9: mod_base = OTHER; note = 2'-O-methyluridine-3'-phosphate
  modified_base 10: mod_base = OTHER; note = 2'-fluorouridine-3'-phosphate
  modified_base 11: mod_base = OTHER; note = 2'-fluoroguanosine-3'-phosphate
  modified_base 12: mod_base = OTHER; note = 2'-fluorouridine-3'-phosphate
  modified_base 13: mod_base = OTHER; note = 2'-fluorouridine-3'-phosphate
  modified_base 14: mod_base = OTHER; note = 2'-O-methyluridine-3'-phosphate
  modified_base 15: mod_base = OTHER; note = 2'-O-methylguanosine-3'-phosphate
  modified_base 16: mod_base = OTHER; note = 2'-O-methyluridine-3'-phosphate
  modified_base 17: mod_base = OTHER; note = 2'-O-methylguanosine-3'-phosphate
  modified_base 18: mod_base = OTHER; note = 2'-O-methyladenosine-3'-phosphate
  modified_base 19: mod_base = OTHER; note = 2'-O-methyladenosine-3'-phosphate
  modified_base 20: mod_base = OTHER; note = 2'-O-methyladenosine-3'-phosphate
  modified_base 21: mod_base = OTHER; note = 2'-O-methylcytidine-3'-phosphorothioate
  modified_base 22: mod_base = OTHER; note = 2'-O-methyladenosine
  misc_feature 22: note = Nucleotide linked to an inverted abasic nucleotide via a 3'-3'-phosphorothioate linkage
cgaccagcttgtttgtgaaaca

SEQ ID NO: 2591 - RNA, 21 nt, synthetic construct
  source 1..21: mol_type = other RNA
  modified_base 1: mod_base = OTHER; note = 2'-O-methyladenosine-3'-phosphorothioate
  modified_base 2: mod_base = OTHER; note = 2'-O-methyladenosine-3'-phosphate
  modified_base 3: mod_base = OTHER; note = 2'-O-methylcytidine-3'-phosphate
  modified_base 4: mod_base = OTHER; note = 2'-O-methylcytidine-3'-phosphate
  modified_base 5: mod_base = OTHER; note = 2'-O-methyladenosine-3'-phosphate
  modified_base 6: mod_base = OTHER; note = 2'-O-methylguanosine-3'-phosphate
  modified_base 7: mod_base = OTHER; note = 2'-fluorocytidine-3'-phosphate
  modified_base 8: mod_base = OTHER; note = 2'-O-methyluridine-3'-phosphate
  modified_base 9: mod_base = OTHER; note = 2'-fluorouridine-3'-phosphate
  modified_base 10: mod_base = OTHER; note = 2'-fluoroguanosine-3'-phosphate
  modified_base 11: mod_base = OTHER; note = 2'-fluorouridine-3'-phosphate
  modified_base 12: mod_base = OTHER; note = 2'-fluorouridine-3'-phosphate
  modified_base 13: mod_base = OTHER; note = 2'-O-methyluridine-3'-phosphate
  modified_base 14: mod_base = OTHER; note = 2'-O-methylguanosine-3'-phosphate
  modified_base 15: mod_base = OTHER; note = 2'-O-methyluridine-3'-phosphate
  modified_base 16: mod_base = OTHER; note = 2'-O-methylguanosine-3'-phosphate
  modified_base 17: mod_base = OTHER; note = 2'-O-methyladenosine-3'-phosphate
  modified_base 18: mod_base = OTHER; note = 2'-O-methyladenosine-3'-phosphate
  modified_base 19: mod_base = OTHER; note = 2'-O-methyladenosine-3'-phosphate
  modified_base 20: mod_base = OTHER; note = 2'-O-methylcytidine-3'-phosphorothioate
  modified_base 21: mod_base = OTHER; note = 2'-O-methyladenosine
  misc_feature 21: note = Nucleotide linked to an inverted abasic nucleotide via a 3'-3'-phosphorothioate linkage
aaccagcttgtttgtgaaaca

SEQ ID NO: 2592 - RNA, 21 nt, synthetic construct
  source 1..21: mol_type = other RNA
  modified_base 1: mod_base = OTHER; note = 2'-O-methyluridine-3'-phosphorothioate
  modified_base 2: mod_base = OTHER; note = 2'-fluoroguanosine-3'-phosphorothioate
  modified_base 3: mod_base = OTHER; note = 2'-O-methyladenosine-3'-phosphate
  modified_base 4: mod_base = OTHER; note = 2'-fluorouridine-3'-phosphate
  modified_base 5: mod_base = OTHER; note = 2'-O-methylcytidine-3'-phosphate
  modified_base 6: mod_base = OTHER; note = 2'-fluoroadenosine-3'-phosphate
  modified_base 7: mod_base = OTHER; note = 2'-O-methyluridine-3'-phosphate
  modified_base 8: mod_base = OTHER; note = 2'-fluoroadenosine-3'-phosphate
  modified_base 9: mod_base = OTHER; note = 2'-O-methylcytidine-3'-phosphate
  modified_base 10: mod_base = OTHER; note = 2'-fluoroadenosine-3'-phosphate
  modified_base 11: mod_base = OTHER; note = 2'-O-methylcytidine-3'-phosphate
  modified_base 12: mod_base = OTHER; note = 2'-fluoroadenosine-3'-phosphate
  modified_base 13: mod_base = OTHER; note = 2'-O-methylguanosine-3'-phosphate
  modified_base 14: mod_base = OTHER; note = 2'-fluorouridine-3'-phosphate
  modified_base 15: mod_base = OTHER; note = 2'-O-methyladenosine-3'-phosphate
  modified_base 16: mod_base = OTHER; note = 2'-fluoroadenosine-3'-phosphate
  modified_base 17: mod_base = OTHER; note = 2'-O-methyladenosine-3'-phosphate
  modified_base 18: mod_base = OTHER; note = 2'-fluorocytidine-3'-phosphate
  modified_base 19: mod_base = OTHER; note = 2'-O-methyladenosine-3'-phosphate
  modified_base 20: mod_base = OTHER; note = 2'-fluoroguanosine-3'-phosphorothioate
  modified_base 21: mod_base = OTHER; note = 2'-O-methylguanosine
tgatcatacacagtaaacagg

SEQ ID NO: 2593 - RNA, 21 nt, synthetic construct
  source 1..21: mol_type = other RNA
  modified_base 1: mod_base = OTHER; note = 2'-O-methyladenosine-3'-phosphorothioate
  modified_base 2: mod_base = OTHER; note = 2'-fluorocytidine-3'-phosphorothioate
  modified_base 3: mod_base = OTHER; note = 2'-O-methyladenosine-3'-phosphate
  modified_base 4: mod_base = OTHER; note = 2'-fluoroguanosine-3'-phosphate
  modified_base 5: mod_base = OTHER; note = 2'-O-methylcytidine-3'-phosphate
  modified_base 6: mod_base = OTHER; note = 2'-fluorocytidine-3'-phosphate
  modified_base 7: mod_base = OTHER; note = 2'-O-methyluridine-3'-phosphate
  modified_base 8: mod_base = OTHER; note = 2'-fluoroguanosine-3'-phosphate
  modified_base 9: mod_base = OTHER; note = 2'-O-methylcytidine-3'-phosphate
  modified_base 10: mod_base = OTHER; note = 2'-fluoroadenosine-3'-phosphate
  modified_base 11: mod_base = OTHER; note = 2'-O-methyluridine-3'-phosphate
  modified_base 12: mod_base = OTHER; note = 2'-fluoroguanosine-3'-phosphate
  modified_base 13: mod_base = OTHER; note = 2'-O-methyladenosine-3'-phosphate
  modified_base 14: mod_base = OTHER; note = 2'-fluoroadenosine-3'-phosphate
  modified_base 15: mod_base = OTHER; note = 2'-O-methylcytidine-3'-phosphate
  modified_base 16: mod_base = OTHER; note = 2'-fluorocytidine-3'-phosphate
  modified_base 17: mod_base = OTHER; note = 2'-O-methyluridine-3'-phosphate
  modified_base 18: mod_base = OTHER; note = 2'-fluoroguanosine-3'-phosphate
  modified_base 19: mod_base = OTHER; note = 2'-O-methyluridine-3'-phosphate
  modified_base 20: mod_base = OTHER; note = 2'-fluorocytidine-3'-phosphorothioate
  modified_base 21: mod_base = OTHER; note = 2'-O-methyladenosine
acagcctgcatgaacctgtca

SEQ ID NO: 2594 - RNA, 22 nt, synthetic construct
  source 1..22: mol_type = other RNA
  modified_base 1: mod_base = OTHER; note = 2'-O-methyluridine-3'-phosphorothioate
  modified_base 2: mod_base = OTHER; note = 2'-fluoroguanosine-3'-phosphorothioate
  modified_base 3: mod_base = OTHER; note = 2'-O-methyluridine-3'-phosphate
  modified_base 4: mod_base = OTHER; note = 2'-fluorouridine-3'-phosphate
  modified_base 5: mod_base = OTHER; note = 2'-O-methyluridine-3'-phosphate
  modified_base 6: mod_base = OTHER; note = 2'-fluorocytidine-3'-phosphate
  modified_base 7: mod_base = OTHER; note = 2'-O-methyladenosine-3'-phosphate
  modified_base 8: mod_base = OTHER; note = 2'-fluorocytidine-3'-phosphate
  modified_base 9: mod_base = OTHER; note = 2'-O-methyladenosine-3'-phosphate
  modified_base 10: mod_base = OTHER; note = 2'-fluoroadenosine-3'-phosphate
  modified_base 11: mod_base = OTHER; note = 2'-O-methyladenosine-3'-phosphate
  modified_base 12: mod_base = OTHER; note = 2'-fluorocytidine-3'-phosphate
  modified_base 13: mod_base = OTHER; note = 2'-O-methyladenosine-3'-phosphate
  modified_base 14: mod_base = OTHER; note = 2'-fluoroadenosine-3'-phosphate
  modified_base 15: mod_base = OTHER; note = 2'-O-methylguanosine-3'-phosphate
  modified_base 16: mod_base = OTHER; note = 2'-fluorocytidine-3'-phosphate
  modified_base 17: mod_base = OTHER; note = 2'-O-methyluridine-3'-phosphate
  modified_base 18: mod_base = OTHER; note = 2'-fluoroguanosine-3'-phosphate
  modified_base 19: mod_base = OTHER; note = 2'-O-methylguanosine-3'-phosphate
  modified_base 20: mod_base = OTHER; note = 2'-fluorouridine-3'-phosphorothioate
  modified_base 21: mod_base = OTHER; note = 2'-O-methylcytidine-3'-phosphorothioate
  modified_base 22: mod_base = OTHER; note = 2'-O-methylguanosine
tgtttcacaaacaagctggtcg

SEQ ID NO: 2595 - RNA, 23 nt, synthetic construct
  source 1..23: mol_type = other RNA
  modified_base 1: mod_base = OTHER; note = 2'-O-methyluridine-3'-phosphorothioate
  modified_base 2: mod_base = OTHER; note = 2'-fluoroguanosine-3'-phosphorothioate
  modified_base 3: mod_base = OTHER; note = 2'-O-methyluridine-3'-phosphate
  modified_base 4: mod_base = OTHER; note = 2'-fluorouridine-3'-phosphate
  modified_base 5: mod_base = OTHER; note = 2'-O-methyluridine-3'-phosphate
  modified_base 6: mod_base = OTHER; note = 2'-fluorocytidine-3'-phosphate
  modified_base 7: mod_base = OTHER; note = 2'-O-methyladenosine-3'-phosphate
  modified_base 8: mod_base = OTHER; note = 2'-fluorocytidine-3'-phosphate
  modified_base 9: mod_base = OTHER; note = 2'-O-methyladenosine-3'-phosphate
  modified_base 10: mod_base = OTHER; note = 2'-fluoroadenosine-3'-phosphate
  modified_base 11: mod_base = OTHER; note = 2'-O-methyladenosine-3'-phosphate
  modified_base 12: mod_base = OTHER; note = 2'-fluorocytidine-3'-phosphate
  modified_base 13: mod_base = OTHER; note = 2'-O-methyladenosine-3'-phosphate
  modified_base 14: mod_base = OTHER; note = 2'-fluoroadenosine-3'-phosphate
  modified_base 15: mod_base = OTHER; note = 2'-O-methylguanosine-3'-phosphate
  modified_base 16: mod_base = OTHER; note = 2'-fluorocytidine-3'-phosphate
  modified_base 17: mod_base = OTHER; note = 2'-O-methyluridine-3'-phosphate
  modified_base 18: mod_base = OTHER; note = 2'-fluoroguanosine-3'-phosphate
  modified_base 19: mod_base = OTHER; note = 2'-O-methylguanosine-3'-phosphate
  modified_base 20: mod_base = OTHER; note = 2'-fluorouridine-3'-phosphate
  modified_base 21: mod_base = OTHER; note = 2'-O-methyluridine-3'-phosphorothioate
  modified_base 22: mod_base = OTHER; note = 2'-O-methylguanosine-3'-phosphorothioate
  modified_base 23: mod_base = OTHER; note = 2'-O-methylguanosine
tgtttcacaaacaagctggttgg

SEQ ID NO: 2596 - RNA, 21 nt, synthetic construct
  source 1..21: mol_type = other RNA
  modified_base 1: mod_base = OTHER; note = 2'-O-methylguanosine-3'-phosphorothioate
  modified_base 2: mod_base = OTHER; note = 2'-O-methyladenosine-3'-phosphorothioate
  modified_base 3: mod_base = OTHER; note = 2'-O-methylcytidine-3'-phosphate
  modified_base 4: mod_base = OTHER; note = 2'-O-methylcytidine-3'-phosphate
  modified_base 5: mod_base = OTHER; note = 2'-O-methyladenosine-3'-phosphate
  modified_base 6: mod_base = OTHER; note = 2'-O-methylguanosine-3'-phosphate
  modified_base 7: mod_base = OTHER; note = 2'-O-methylcytidine-3'-phosphate
  modified_base 8: mod_base = OTHER; note = 2'-O-methyluridine-3'-phosphate
  modified_base 9: mod_base = OTHER; note = 2'-fluorouridine-3'-phosphate
  modified_base 10: mod_base = OTHER; note = 2'-O-methylguanosine-3'-phosphate
  modified_base 11: mod_base = OTHER; note = 2'-fluorouridine-3'-phosphate
  modified_base 12: mod_base = OTHER; note = 2'-O-methyluridine-3'-phosphate
  modified_base 13: mod_base = OTHER; note = 2'-fluorouridine-3'-phosphate
  modified_base 14: mod_base = OTHER; note = 2'-O-methylguanosine-3'-phosphate
  modified_base 15: mod_base = OTHER; note = 2'-O-methyluridine-3'-phosphate
  modified_base 16: mod_base = OTHER; note = 2'-O-methylguanosine-3'-phosphate
  modified_base 17: mod_base = OTHER; note = 2'-O-methyladenosine-3'-phosphate
  modified_base 18: mod_base = OTHER; note = 2'-O-methyladenosine-3'-phosphate
  modified_base 19: mod_base = OTHER; note = 2'-O-methyladenosine-3'-phosphate
  modified_base 20: mod_base = OTHER; note = 2'-O-methylcytidine-3'-phosphorothioate
  modified_base 21: mod_base = OTHER; note = 2'-O-methyladenosine-3'-phosphate
gaccagcttgtttgtgaaaca

SEQ ID NO: 2597 - RNA, 21 nt, synthetic construct
  source 1..21: mol_type = other RNA
  modified_base 1: mod_base = OTHER; note = 2'-O-methylcytidine-3'-phosphate
  modified_base 2: mod_base = OTHER; note = 2'-O-methyladenosine-3'-phosphate
  modified_base 3: mod_base = OTHER; note = 2'-O-methylcytidine-3'-phosphate
  modified_base 4: mod_base = OTHER; note = 2'-O-methylcytidine-3'-phosphate
  modified_base 5: mod_base = OTHER; note = 2'-O-methyladenosine-3'-phosphate
  modified_base 6: mod_base = OTHER; note = 2'-O-methylguanosine-3'-phosphate
  modified_base 7: mod_base = OTHER; note = 2'-O-methylcytidine-3'-phosphate
  modified_base 8: mod_base = OTHER; note = 2'-O-methyluridine-3'-phosphate
  modified_base 9: mod_base = OTHER; note = 2'-fluorouridine-3'-phosphate
  modified_base 10: mod_base = OTHER; note = 2'-O-methylguanosine-3'-phosphate
  modified_base 11: mod_base = OTHER; note = 2'-fluorouridine-3'-phosphate
  modified_base 12: mod_base = OTHER; note = 2'-O-methyluridine-3'-phosphate
  modified_base 13: mod_base = OTHER; note = 2'-fluorouridine-3'-phosphate
  modified_base 14: mod_base = OTHER; note = 2'-O-methylguanosine-3'-phosphate
  modified_base 15: mod_base = OTHER; note = 2'-O-methyluridine-3'-phosphate
  modified_base 16: mod_base = OTHER; note = 2'-O-methylguanosine-3'-phosphate
  modified_base 17: mod_base = OTHER; note = 2'-O-methyladenosine-3'-phosphate
  modified_base 18: mod_base = OTHER; note = 2'-O-methyladenosine-3'-phosphate
  modified_base 19: mod_base = OTHER; note = 2'-O-methyladenosine-3'-phosphate
  modified_base 20: mod_base = OTHER; note = 2'-O-methylcytidine-3'-phosphate
  modified_base 21: mod_base = OTHER; note = 2'-O-methyladenosine
  misc_feature 1: note = Nucleotide linked to an inverted abasic nucleotide via a 5'-5'-phosphorothioate linkage
  misc_feature 21: note = Nucleotide linked to an inverted abasic nucleotide via a 3'-3'-phosphorothioate linkage
caccagcttgtttgtgaaaca

SEQ ID NO: 2598 - RNA, 21 nt, synthetic construct
  source 1..21: mol_type = other RNA
  modified_base 1: mod_base = OTHER; note = 2'-O-methyluridine-3'-phosphorothioate
  modified_base 2: mod_base = OTHER; note = 2'-fluoroguanosine-3'-phosphorothioate
  modified_base 3: mod_base = OTHER; note = 2'-O-methyluridine-3'-phosphate
  modified_base 4: mod_base = OTHER; note = 2'-O-methyluridine-3'-phosphate
  modified_base 5: mod_base = OTHER; note = 2'-O-methyluridine-3'-phosphate
  modified_base 6: mod_base = OTHER; note = 2'-O-methylcytidine-3'-phosphate
  modified_base 7: mod_base = OTHER; note = 2'-fluoroadenosine-3'-phosphate
  modified_base 8: mod_base = OTHER; note = 2'-O-methylcytidine-3'-phosphate
  modified_base 9: mod_base = OTHER; note = 2'-O-methyladenosine-3'-phosphate
  modified_base 10: mod_base = OTHER; note = 2'-O-methyladenosine-3'-phosphate
  modified_base 11: mod_base = OTHER; note = 2'-O-methyladenosine-3'-phosphate
  modified_base 12: mod_base = OTHER; note = 2'-fluorocytidine-3'-phosphate
  modified_base 13: mod_base = OTHER; note = 2'-O-methyladenosine-3'-phosphate
  modified_base 14: mod_base = OTHER; note = 2'-fluoroadenosine-3'-phosphate
  modified_base 15: mod_base = OTHER; note = 2'-O-methylguanosine-3'-phosphate
  modified_base 16: mod_base = OTHER; note = 2'-fluorocytidine-3'-phosphate
  modified_base 17: mod_base = OTHER; note = 2'-O-methyluridine-3'-phosphate
  modified_base 18: mod_base = OTHER; note = 2'-O-methylguanosine-3'-phosphate
  modified_base 19: mod_base = OTHER; note = 2'-O-methylguanosine-3'-phosphorothioate
  modified_base 20: mod_base = OTHER; note = 2'-O-methyluridine-3'-phosphorothioate
  modified_base 21: mod_base = OTHER; note = 2'-O-methylcytidine
tgtttcacaaacaagctggtc

SEQ ID NO: 2599 - RNA, 21 nt, synthetic construct
  source 1..21: mol_type = other RNA
  modified_base 1: mod_base = OTHER; note = 2'-O-methyluridine-3'-phosphorothioate
  modified_base 2: mod_base = OTHER; note = 2'-fluoroguanosine-3'-phosphorothioate
  modified_base 3: mod_base = OTHER; note = 2'-O-methyluridine-3'-phosphate
  modified_base 4: mod_base = OTHER; note = 2'-O-methyluridine-3'-phosphate
  modified_base 5: mod_base = OTHER; note = 2'-O-methyluridine-3'-phosphate
  modified_base 6: mod_base = OTHER; note = 2'-O-methylcytidine-3'-phosphate
  modified_base 7: mod_base = OTHER; note = 2'-fluoroadenosine-3'-phosphate
  modified_base 8: mod_base = OTHER; note = 2'-O-methylcytidine-3'-phosphate
  modified_base 9: mod_base = OTHER; note = 2'-O-methyladenosine-3'-phosphate
  modified_base 10: mod_base = OTHER; note = 2'-O-methyladenosine-3'-phosphate
  modified_base 11: mod_base = OTHER; note = 2'-O-methyladenosine-3'-phosphate
  modified_base 12: mod_base = OTHER; note = 2'-fluorocytidine-3'-phosphate
  modified_base 13: mod_base = OTHER; note = 2'-O-methyladenosine-3'-phosphate
  modified_base 14: mod_base = OTHER; note = 2'-fluoroadenosine-3'-phosphate
  modified_base 15: mod_base = OTHER; note = 2'-O-methylguanosine-3'-phosphate
  modified_base 16: mod_base = OTHER; note = 2'-fluorocytidine-3'-phosphate
  modified_base 17: mod_base = OTHER; note = 2'-O-methyluridine-3'-phosphate
  modified_base 18: mod_base = OTHER; note = 2'-O-methylguanosine-3'-phosphate
  modified_base 19: mod_base = OTHER; note = 2'-O-methylguanosine-3'-phosphorothioate
  modified_base 20: mod_base = OTHER; note = 2'-O-methyluridine-3'-phosphorothioate
  modified_base 21: mod_base = OTHER; note = 2'-O-methylguanosine
tgtttcacaaacaagctggtg

SEQ ID NO: 2600 - RNA, 23 nt, synthetic construct
  source 1..23: mol_type = other RNA
  modified_base 1: mod_base = OTHER; note 5'-(E)-vinylphosphonate-2'-O-methyluridine-3'-phosphorothio ate
  modified_base 2: mod_base = OTHER; note = 2'-fluorouridine-3'-phosphorothioate
  modified_base 3: mod_base = OTHER; note = Uracil threose nucleic acid-2'-phosphate
  modified_base 4: mod_base = OTHER; note = 2'-O-methylguanosine-3'-phosphate
  modified_base 5: mod_base = OTHER; note = 2'-O-methyladenosine-3'-phosphate
  modified_base 6: mod_base = OTHER; note = 2'-fluorocytidine-3'-phosphate
  modified_base 7: mod_base = OTHER; note = 2'-O-methyladenosine-3'-phosphate
  modified_base 8: mod_base = OTHER; note = 2'-O-methyladenosine-3'-phosphate
  modified_base 9: mod_base = OTHER; note = 2'-O-methylcytidine-3'-phosphate
  modified_base 10: mod_base = OTHER; note = 2'-O-methyladenosine-3'-phosphate
  modified_base 11: mod_base = OTHER; note = 2'-O-methyluridine-3'-phosphate
  modified_base 12: mod_base = OTHER; note = 2'-O-methyluridine-3'-phosphate
  modified_base 13: mod_base = OTHER; note = 2'-O-methylguanosine-3'-phosphate
  modified_base 14: mod_base = OTHER; note = 2'-fluorouridine-3'-phosphate
  modified_base 15: mod_base = OTHER; note = 2'-O-methyladenosine-3'-phosphate
  modified_base 16: mod_base = OTHER; note = 2'-fluoroguanosine-3'-phosphate
  modified_base 17: mod_base = OTHER; note = 2'-O-methylcytidine-3'-phosphate
  modified_base 18: mod_base = OTHER; note = 2'-O-methyluridine-3'-phosphate
  modified_base 19: mod_base = OTHER; note = 2'-O-methyladenosine-3'-phosphate
  modified_base 20: mod_base = OTHER; note = 2'-O-methylcytidine-3'-phosphate
  modified_base 21: mod_base = OTHER; note = 2'-O-methyladenosine-3'-phosphorothioate
  modified_base 22: mod_base = OTHER; note = 2'-O-methylguanosine-3'-phosphorothioate
  modified_base 23: mod_base = OTHER; note = 2'-O-methyladenosine
tttgacaacattgtagctacaga

SEQ ID NO: 2601 - RNA, 23 nt, synthetic construct
  source 1..23: mol_type = other RNA
  modified_base 1: mod_base = OTHER; note 5'-(E)-vinylphosphonate-2'-O-methyladenosine-3'-phosphoroth ioate
  modified_base 2: mod_base = OTHER; note = 2'-fluorocytidine-3'-phosphorothioate
  modified_base 3: mod_base = OTHER; note = Adenine threose nucleic acid-2'-phosphate
  modified_base 4: mod_base = OTHER; note = 2'-O-methylguanosine-3'-phosphate
  modified_base 5: mod_base = OTHER; note = 2'-O-methyladenosine-3'-phosphate
  modified_base 6: mod_base = OTHER; note = 2'-fluorouridine-3'-phosphate
  modified_base 7: mod_base = OTHER; note = 2'-O-methyluridine-3'-phosphate
  modified_base 8: mod_base = OTHER; note = 2'-O-methyluridine-3'-phosphate
  modified_base 9: mod_base = OTHER; note = 2'-O-methyluridine-3'-phosphate
  modified_base 10: mod_base = OTHER; note = 2'-O-methyladenosine-3'-phosphate
  modified_base 11: mod_base = OTHER; note = 2'-O-methyluridine-3'-phosphate
  modified_base 12: mod_base = OTHER; note = 2'-O-methylguanosine-3'-phosphate
  modified_base 13: mod_base = OTHER; note = 2'-O-methyluridine-3'-phosphate
  modified_base 14: mod_base = OTHER; note = 2'-fluorouridine-3'-phosphate
  modified_base 15: mod_base = OTHER; note = 2'-O-methyladenosine-3'-phosphate
  modified_base 16: mod_base = OTHER; note = 2'-fluoroguanosine-3'-phosphate
  modified_base 17: mod_base = OTHER; note = 2'-O-methyluridine-3'-phosphate
  modified_base 18: mod_base = OTHER; note = 2'-O-methylcytidine-3'-phosphate
  modified_base 19: mod_base = OTHER; note = 2'-O-methylcytidine-3'-phosphate
  modified_base 20: mod_base = OTHER; note = 2'-O-methyluridine-3'-phosphate
  modified_base 21: mod_base = OTHER; note = 2'-O-methyluridine-3'-phosphorothioate
  modified_base 22: mod_base = OTHER; note = 2'-O-methyluridine-3'-phosphorothioate
  modified_base 23: mod_base = OTHER; note = 2'-O-methyladenosine
acagattttatgttagtccttta

SEQ ID NO: 2602 - RNA, 23 nt, synthetic construct
  source 1..23: mol_type = other RNA
  modified_base 1: mod_base = OTHER; note 5'-(E)-vinylphosphonate-2'-O-methyluridine-3'-phosphorothio ate
  modified_base 2: mod_base = OTHER; note = 2'-fluorouridine-3'-phosphorothioate
  modified_base 3: mod_base = OTHER; note = Cytosine threose nucleic acid-2'-phosphate
  modified_base 4: mod_base = OTHER; note = 2'-O-methylguanosine-3'-phosphate
  modified_base 5: mod_base = OTHER; note = 2'-O-methyladenosine-3'-phosphate
  modified_base 6: mod_base = OTHER; note = 2'-fluoroadenosine-3'-phosphate
  modified_base 7: mod_base = OTHER; note = 2'-O-methyladenosine-3'-phosphate
  modified_base 8: mod_base = OTHER; note = 2'-O-methyladenosine-3'-phosphate
  modified_base 9: mod_base = OTHER; note = 2'-O-methyladenosine-3'-phosphate
  modified_base 10: mod_base = OTHER; note = 2'-O-methylguanosine-3'-phosphate
  modified_base 11: mod_base = OTHER; note = 2'-O-methyluridine-3'-phosphate
  modified_base 12: mod_base = OTHER; note = 2'-O-methylcytidine-3'-phosphate
  modified_base 13: mod_base = OTHER; note = 2'-O-methyluridine-3'-phosphate
  modified_base 14: mod_base = OTHER; note = 2'-fluorouridine-3'-phosphate
  modified_base 15: mod_base = OTHER; note = 2'-O-methylguanosine-3'-phosphate
  modified_base 16: mod_base = OTHER; note = 2'-fluoroadenosine-3'-phosphate
  modified_base 17: mod_base = OTHER; note = 2'-O-methylcytidine-3'-phosphate
  modified_base 18: mod_base = OTHER; note = 2'-O-methyladenosine-3'-phosphate
  modified_base 19: mod_base = OTHER; note = 2'-O-methyladenosine-3'-phosphate
  modified_base 20: mod_base = OTHER; note = 2'-O-methylcytidine-3'-phosphate
  modified_base 21: mod_base = OTHER; note = 2'-O-methyladenosine-3'-phosphorothioate
  modified_base 22: mod_base = OTHER; note = 2'-O-methyluridine-3'-phosphorothioate
  modified_base 23: mod_base = OTHER; note = 2'-O-methyluridine
ttcgaaaaagtcttgacaacatt

SEQ ID NO: 2603 - RNA, 23 nt, synthetic construct
  source 1..23: mol_type = other RNA
  modified_base 1: mod_base = OTHER; note 5'-(E)-vinylphosphonate-2'-O-methyluridine-3'-phosphorothio ate
  modified_base 2: mod_base = OTHER; note = 2'-fluorouridine-3'-phosphorothioate
  modified_base 3: mod_base = OTHER; note = Uracil threose nucleic acid-2'-phosphate
  modified_base 4: mod_base = OTHER; note = 2'-O-methyladenosine-3'-phosphate
  modified_base 5: mod_base = OTHER; note = 2'-O-methyladenosine-3'-phosphate
  modified_base 6: mod_base = OTHER; note = 2'-fluorouridine-3'-phosphate
  modified_base 7: mod_base = OTHER; note = 2'-O-methyluridine-3'-phosphate
  modified_base 8: mod_base = OTHER; note = 2'-O-methylcytidine-3'-phosphate
  modified_base 9: mod_base = OTHER; note = 2'-O-methyladenosine-3'-phosphate
  modified_base 10: mod_base = OTHER; note = 2'-O-methylcytidine-3'-phosphate
  modified_base 11: mod_base = OTHER; note = 2'-O-methyladenosine-3'-phosphate
  modified_base 12: mod_base = OTHER; note = 2'-O-methylguanosine-3'-phosphate
  modified_base 13: mod_base = OTHER; note = 2'-O-methyladenosine-3'-phosphate
  modified_base 14: mod_base = OTHER; note = 2'-fluorouridine-3'-phosphate
  modified_base 15: mod_base = OTHER; note = 2'-O-methyluridine-3'-phosphate
  modified_base 16: mod_base = OTHER; note = 2'-fluorouridine-3'-phosphate
  modified_base 17: mod_base = OTHER; note = 2'-O-methyluridine-3'-phosphate
  modified_base 18: mod_base = OTHER; note = 2'-O-methyladenosine-3'-phosphate
  modified_base 19: mod_base = OTHER; note = 2'-O-methyluridine-3'-phosphate
  modified_base 20: mod_base = OTHER; note = 2'-O-methylguanosine-3'-phosphate
  modified_base 21: mod_base = OTHER; note = 2'-O-methyluridine-3'-phosphorothioate
  modified_base 22: mod_base = OTHER; note = 2'-O-methyluridine-3'-phosphorothioate
  modified_base 23: mod_base = OTHER; note = 2'-O-methyladenosine
tttaattcacagattttatgtta

SEQ ID NO: 2604 - RNA, 23 nt, synthetic construct
  source 1..23: mol_type = other RNA
  modified_base 1: mod_base = OTHER; note 5'-(E)-vinylphosphonate-2'-O-methyluridine-3'-phosphorothio ate
  modified_base 2: mod_base = OTHER; note = 2'-fluoroadenosine-3'-phosphorothioate
  modified_base 3: mod_base = OTHER; note = Adenine threose nucleic acid-2'-phosphate
  modified_base 4: mod_base = OTHER; note = 2'-O-methyluridine-3'-phosphate
  modified_base 5: mod_base = OTHER; note = 2'-O-methyluridine-3'-phosphate
  modified_base 6: mod_base = OTHER; note = 2'-fluorouridine-3'-phosphate
  modified_base 7: mod_base = OTHER; note = 2'-O-methyladenosine-3'-phosphate
  modified_base 8: mod_base = OTHER; note = 2'-O-methylcytidine-3'-phosphate
  modified_base 9: mod_base = OTHER; note = 2'-O-methyladenosine-3'-phosphate
  modified_base 10: mod_base = OTHER; note = 2'-O-methyladenosine-3'-phosphate
  modified_base 11: mod_base = OTHER; note = 2'-O-methyladenosine-3'-phosphate
  modified_base 12: mod_base = OTHER; note = 2'-O-methylcytidine-3'-phosphate
  modified_base 13: mod_base = OTHER; note = 2'-O-methyladenosine-3'-phosphate
  modified_base 14: mod_base = OTHER; note = 2'-fluorouridine-3'-phosphate
  modified_base 15: mod_base = OTHER; note = 2'-O-methylguanosine-3'-phosphate
  modified_base 16: mod_base = OTHER; note = 2'-fluoroadenosine-3'-phosphate
  modified_base 17: mod_base = OTHER; note = 2'-O-methyladenosine-3'-phosphate
  modified_base 18: mod_base = OTHER; note = 2'-O-methylcytidine-3'-phosphate
  modified_base 19: mod_base = OTHER; note = 2'-O-methyluridine-3'-phosphate
  modified_base 20: mod_base = OTHER; note = 2'-O-methyluridine-3'-phosphate
  modified_base 21: mod_base = OTHER; note = 2'-O-methyladenosine-3'-phosphorothioate
  modified_base 22: mod_base = OTHER; note = 2'-O-methylguanosine-3'-phosphorothioate
  modified_base 23: mod_base = OTHER; note = 2'-O-methyladenosine
taatttacaaacatgaacttaga

SEQ ID NO: 2605 - RNA, 23 nt, synthetic construct
  source 1..23: mol_type = other RNA
  modified_base 1: mod_base = OTHER; note 5'-(E)-vinylphosphonate-2'-O-methyladenosine-3'-phosphoroth ioate
  modified_base 2: mod_base = OTHER; note = 2'-fluoroguanosine-3'-phosphorothioate
  modified_base 3: mod_base = OTHER; note = Adenine threose nucleic acid-2'-phosphate
  modified_base 4: mod_base = OTHER; note = 2'-O-methyladenosine-3'-phosphate
  modified_base 5: mod_base = OTHER; note = 2'-O-methylcytidine-3'-phosphate
  modified_base 6: mod_base = OTHER; note = 2'-fluorouridine-3'-phosphate
  modified_base 7: mod_base = OTHER; note = 2'-O-methyladenosine-3'-phosphate
  modified_base 8: mod_base = OTHER; note = 2'-O-methyluridine-3'-phosphate
  modified_base 9: mod_base = OTHER; note = 2'-O-methyluridine-3'-phosphate
  modified_base 10: mod_base = OTHER; note = 2'-O-methyluridine-3'-phosphate
  modified_base 11: mod_base = OTHER; note = 2'-O-methyladenosine-3'-phosphate
  modified_base 12: mod_base = OTHER; note = 2'-O-methylguanosine-3'-phosphate
  modified_base 13: mod_base = OTHER; note = 2'-O-methylcytidine-3'-phosphate
  modified_base 14: mod_base = OTHER; note = 2'-fluoroadenosine-3'-phosphate
  modified_base 15: mod_base = OTHER; note = 2'-O-methyluridine-3'-phosphate
  modified_base 16: mod_base = OTHER; note = 2'-fluoroguanosine-3'-phosphate
  modified_base 17: mod_base = OTHER; note = 2'-O-methyluridine-3'-phosphate
  modified_base 18: mod_base = OTHER; note = 2'-O-methyluridine-3'-phosphate
  modified_base 19: mod_base = OTHER; note = 2'-O-methyluridine-3'-phosphate
  modified_base 20: mod_base = OTHER; note = 2'-O-methyladenosine-3'-phosphate
  modified_base 21: mod_base = OTHER; note = 2'-O-methyladenosine-3'-phosphorothioate
  modified_base 22: mod_base = OTHER; note = 2'-O-methylcytidine-3'-phosphorothioate
  modified_base 23: mod_base = OTHER; note = 2'-O-methyladenosine
agaactatttagcatgtttaaca

SEQ ID NO: 2606 - RNA, 23 nt, synthetic construct
  source 1..23: mol_type = other RNA
  modified_base 1: mod_base = OTHER; note 5'-(E)-vinylphosphonate-2'-O-methyluridine-3'-phosphorothio ate
  modified_base 2: mod_base = OTHER; note = 2'-fluorouridine-3'-phosphorothioate
  modified_base 3: mod_base = OTHER; note = 2'-O-methylcytidine-3'-phosphate
  modified_base 4: mod_base = OTHER; note = 2'-O-methylguanosine-3'-phosphate
  modified_base 5: mod_base = OTHER; note = 2'-O-methyladenosine-3'-phosphate
  modified_base 6: mod_base = OTHER; note = 2'-fluoroadenosine-3'-phosphate
  modified_base 7: mod_base = OTHER; note = 2'-O-methyladenosine-3'-phosphate
  modified_base 8: mod_base = OTHER; note = 2'-O-methyladenosine-3'-phosphate
  modified_base 9: mod_base = OTHER; note = 2'-O-methyladenosine-3'-phosphate
  modified_base 10: mod_base = OTHER; note = 2'-O-methylguanosine-3'-phosphate
  modified_base 11: mod_base = OTHER; note = 2'-O-methyluridine-3'-phosphate
  modified_base 12: mod_base = OTHER; note = 2'-O-methylcytidine-3'-phosphate
  modified_base 13: mod_base = OTHER; note = 2'-O-methyluridine-3'-phosphate
  modified_base 14: mod_base = OTHER; note = 2'-fluorouridine-3'-phosphate
  modified_base 15: mod_base = OTHER; note = 2'-O-methylguanosine-3'-phosphate
  modified_base 16: mod_base = OTHER; note = 2'-fluoroadenosine-3'-phosphate
  modified_base 17: mod_base = OTHER; note = 2'-O-methylcytidine-3'-phosphate
  modified_base 18: mod_base = OTHER; note = 2'-O-methyladenosine-3'-phosphate
  modified_base 19: mod_base = OTHER; note = 2'-O-methyladenosine-3'-phosphate
  modified_base 20: mod_base = OTHER; note = 2'-O-methylcytidine-3'-phosphate
  modified_base 21: mod_base = OTHER; note = 2'-O-methyladenosine-3'-phosphorothioate
  modified_base 22: mod_base = OTHER; note = 2'-O-methyluridine-3'-phosphorothioate
  modified_base 23: mod_base = OTHER; note = 2'-O-methyluridine
ttcgaaaaagtcttgacaacatt

SEQ ID NO: 2607 - RNA, 21 nt, synthetic construct
  source 1..21: mol_type = other RNA
  modified_base 1: mod_base = OTHER; note = 2'-O-methoxyethyl(MOE)-thymidine(or 5-methyluridine)-3'- phosphorothioate
  modified_base 2: mod_base = OTHER; note = 2'-O-methoxyethyl(MOE) guanosine-3'-phosphorothioate
  modified_base 3: mod_base = OTHER; note = 2'-O-methyluridine-3'-phosphate
  modified_base 4: mod_base = OTHER; note = 2'-O-methyluridine-3'-phosphate
  modified_base 5: mod_base = OTHER; note = 2'-O-methylguanosine-3'-phosphate
  modified_base 6: mod_base = OTHER; note = 2'-O-methyluridine-3'-phosphate
  modified_base 7: mod_base = OTHER; note = 2'-fluorocytidine-3'-phosphate
  modified_base 8: mod_base = OTHER; note = 2'-O-methyladenosine-3'-phosphate
  modified_base 9: mod_base = OTHER; note = 2'-fluoroadenosine-3'-phosphate
  modified_base 10: mod_base = OTHER; note = 2'-fluoroguanosine-3'-phosphate
  modified_base 11: mod_base = OTHER; note = 2'-fluoroadenosine-3'-phosphate
  modified_base 12: mod_base = OTHER; note = 2'-O-methylcytidine-3'-phosphate
  modified_base 13: mod_base = OTHER; note = 2'-O-methyluridine-3'-phosphate
  modified_base 14: mod_base = OTHER; note = 2'-O-methyluridine-3'-phosphate
  modified_base 15: mod_base = OTHER; note = 2'-O-methyluridine-3'-phosphate
  modified_base 16: mod_base = OTHER; note = 2'-O-methyluridine-3'-phosphate
  modified_base 17: mod_base = OTHER; note = 2'-O-methyluridine-3'-phosphate
  modified_base 18: mod_base = OTHER; note = 2'-O-methylcytidine-3'-phosphate
  modified_base 19: mod_base = OTHER; note = 2'-O-methylguanosine-3'-phosphate
  modified_base 20: mod_base = OTHER; note = 2'-O-methoxyethyl(MOE) adenosine-3'-phosphate
  modified_base 21: mod_base = OTHER; note = 2'-O-methoxyethyl(MOE) adenosine-3'-phosphate
tgttgtcaagactttttcgaa

SEQ ID NO: 2608 - RNA, 23 nt, synthetic construct
  source 1..23: mol_type = other RNA
  modified_base 1: mod_base = OTHER; note 5'-(E)-vinylphosphonate-2'-O-methyluridine-3'-phosphorothio ate
  modified_base 2: mod_base = OTHER; note = 2'-fluorouridine-3'-phosphorothioate
  modified_base 3: mod_base = OTHER; note = 2'-O-methylguanosine-3'-phosphate
  modified_base 4: mod_base = OTHER; note = 2'-O-methyladenosine-3'-phosphate
  modified_base 5: mod_base = OTHER; note = 2'-O-methyladenosine-3'-phosphate
  modified_base 6: mod_base = OTHER; note = 2'-fluorocytidine-3'-phosphate
  modified_base 7: mod_base = OTHER; note = 2'-O-methyladenosine-3'-phosphate
  modified_base 8: mod_base = OTHER; note = 2'-O-methylcytidine-3'-phosphate
  modified_base 9: mod_base = OTHER; note = 2'-O-methylcytidine-3'-phosphate
  modified_base 10: mod_base = OTHER; note = 2'-O-methyluridine-3'-phosphate
  modified_base 11: mod_base = OTHER; note = 2'-O-methyladenosine-3'-phosphate
  modified_base 12: mod_base = OTHER; note = 2'-O-methylguanosine-3'-phosphate
  modified_base 13: mod_base = OTHER; note = 2'-O-methylcytidine-3'-phosphate
  modified_base 14: mod_base = OTHER; note = 2'-fluoroadenosine-3'-phosphate
  modified_base 15: mod_base = OTHER; note = 2'-O-methyluridine-3'-phosphate
  modified_base 16: mod_base = OTHER; note = 2'-fluorocytidine-3'-phosphate
  modified_base 17: mod_base = OTHER; note = 2'-O-methyluridine-3'-phosphate
  modified_base 18: mod_base = OTHER; note = 2'-O-methylguanosine-3'-phosphate
  modified_base 19: mod_base = OTHER; note = 2'-O-methylcytidine-3'-phosphate
  modified_base 20: mod_base = OTHER; note = 2'-O-methyladenosine-3'-phosphate
  modified_base 21: mod_base = OTHER; note = 2'-O-methyladenosine-3'-phosphorothioate
  modified_base 22: mod_base = OTHER; note = 2'-O-methyladenosine-3'-phosphorothioate
  modified_base 23: mod_base = OTHER; note = 2'-O-methylcytidine
ttgaacacctagcatctgcaaac

SEQ ID NO: 2609 - RNA, 21 nt, synthetic construct
  source 1..21: mol_type = other RNA
  modified_base 1: mod_base = OTHER; note = 2'-O-methoxyethyl(MOE)-thymidine(or 5-methyluridine)-3'- phosphorothioate
  modified_base 2: mod_base = OTHER; note = 2'-O-methoxyethyl(MOE)-thymidine(or 5-methyluridine)-3'- phosphorothioate
  modified_base 3: mod_base = OTHER; note = 2'-O-methylguanosine-3'-phosphate
  modified_base 4: mod_base = OTHER; note = 2'-O-methylcytidine-3'-phosphate
  modified_base 5: mod_base = OTHER; note = 2'-O-methyladenosine-3'-phosphate
  modified_base 6: mod_base = OTHER; note = 2'-O-methylguanosine-3'-phosphate
  modified_base 7: mod_base = OTHER; note = 2'-fluoroadenosine-3'-phosphate
  modified_base 8: mod_base = OTHER; note = 2'-O-methyluridine-3'-phosphate
  modified_base 9: mod_base = OTHER; note = 2'-fluoroguanosine-3'-phosphate
  modified_base 10: mod_base = OTHER; note = 2'-fluorocytidine-3'-phosphate
  modified_base 11: mod_base = OTHER; note = 2'-fluorouridine-3'-phosphate
  modified_base 12: mod_base = OTHER; note = 2'-O-methyladenosine-3'-phosphate
  modified_base 13: mod_base = OTHER; note = 2'-O-methylguanosine-3'-phosphate
  modified_base 14: mod_base = OTHER; note = 2'-O-methylguanosine-3'-phosphate
  modified_base 15: mod_base = OTHER; note = 2'-O-methyluridine-3'-phosphate
  modified_base 16: mod_base = OTHER; note = 2'-O-methylguanosine-3'-phosphate
  modified_base 17: mod_base = OTHER; note = 2'-O-methyluridine-3'-phosphate
  modified_base 18: mod_base = OTHER; note = 2'-O-methyluridine-3'-phosphate
  modified_base 19: mod_base = OTHER; note = 2'-O-methylcytidine-3'-phosphate
  modified_base 20: mod_base = OTHER; note = 2'-O-methoxyethyl(MOE) adenosine-3'-phosphate
  modified_base 21: mod_base = OTHER; note = 2'-O-methoxyethyl(MOE) adenosine-3'-phosphate
ttgcagatgctaggtgttcaa

SEQ ID NO: 2610 - RNA, 23 nt, synthetic construct
  source 1..23: mol_type = other RNA
  modified_base 1: mod_base = OTHER; note 5'-(E)-vinylphosphonate-2'-O-methyluridine-3'-phosphorothio ate
  modified_base 2: mod_base = OTHER; note = 2'-fluorouridine-3'-phosphorothioate
  modified_base 3: mod_base = OTHER; note = 2'-O-methylguanosine-3'-phosphate
  modified_base 4: mod_base = OTHER; note = 2'-O-methylcytidine-3'-phosphate
  modified_base 5: mod_base = OTHER; note = adenine glycol nucleic acid-2'-phosphate
  modified_base 6: mod_base = OTHER; note = 2'-O-methyluridine-3'-phosphate
  modified_base 7: mod_base = OTHER; note = 2'-O-methyluridine-3'-phosphate
  modified_base 8: mod_base = OTHER; note = 2'-O-methylcytidine-3'-phosphate
  modified_base 9: mod_base = OTHER; note = 2'-O-methylguanosine-3'-phosphate
  modified_base 10: mod_base = OTHER; note = 2'-O-methyladenosine-3'-phosphate
  modified_base 11: mod_base = OTHER; note = 2'-O-methyladenosine-3'-phosphate
  modified_base 12: mod_base = OTHER; note = 2'-O-methyladenosine-3'-phosphate
  modified_base 13: mod_base = OTHER; note = 2'-O-methyladenosine-3'-phosphate
  modified_base 14: mod_base = OTHER; note = 2'-fluoroadenosine-3'-phosphate
  modified_base 15: mod_base = OTHER; note = 2'-O-methylguanosine-3'-phosphate
  modified_base 16: mod_base = OTHER; note = 2'-fluorouridine-3'-phosphate
  modified_base 17: mod_base = OTHER; note = 2'-O-methylcytidine-3'-phosphate
  modified_base 18: mod_base = OTHER; note = 2'-O-methyluridine-3'-phosphate
  modified_base 19: mod_base = OTHER; note = 2'-O-methyluridine-3'-phosphate
  modified_base 20: mod_base = OTHER; note = 2'-O-methylguanosine-3'-phosphate
  modified_base 21: mod_base = OTHER; note = 2'-O-methyladenosine-3'-phosphorothioate
  modified_base 22: mod_base = OTHER; note = 2'-O-methylcytidine-3'-phosphorothioate
  modified_base 23: mod_base = OTHER; note = 2'-O-methyladenosine
ttgcattcgaaaaagtcttgaca

SEQ ID NO: 2611 - RNA, 21 nt, synthetic construct
  source 1..21: mol_type = other RNA
  modified_base 1: mod_base = OTHER; note = 2'-O-methoxyethyl(MOE)-thymidine(or 5-methyluridine)-3'- phosphorothioate
  modified_base 2: mod_base = OTHER; note 2'-O-methoxyethyl(MOE)-5-methylcytidine-3'-phosphorothioate
  modified_base 3: mod_base = OTHER; note = 2'-O-methyladenosine-3'-phosphate
  modified_base 4: mod_base = OTHER; note = 2'-O-methyladenosine-3'-phosphate
  modified_base 5: mod_base = OTHER; note = 2'-O-methylguanosine-3'-phosphate
  modified_base 6: mod_base = OTHER; note = 2'-O-methyladenosine-3'-phosphate
  modified_base 7: mod_base = OTHER; note = 2'-fluorocytidine-3'-phosphate
  modified_base 8: mod_base = OTHER; note = 2'-O-methyluridine-3'-phosphate
  modified_base 9: mod_base = OTHER; note = 2'-fluorouridine-3'-phosphate
  modified_base 10: mod_base = OTHER; note = 2'-fluorouridine-3'-phosphate
  modified_base 11: mod_base = OTHER; note = 2'-fluorouridine-3'-phosphate
  modified_base 12: mod_base = OTHER; note = 2'-O-methyluridine-3'-phosphate
  modified_base 13: mod_base = OTHER; note = 2'-O-methylcytidine-3'-phosphate
  modified_base 14: mod_base = OTHER; note = 2'-O-methylguanosine-3'-phosphate
  modified_base 15: mod_base = OTHER; note = 2'-O-methyladenosine-3'-phosphate
  modified_base 16: mod_base = OTHER; note = 2'-O-methyladenosine-3'-phosphate
  modified_base 17: mod_base = OTHER; note = 2'-O-methyluridine-3'-phosphate
  modified_base 18: mod_base = OTHER; note = 2'-O-methylguanosine-3'-phosphate
  modified_base 19: mod_base = OTHER; note = 2'-O-methylcytidine-3'-phosphate
  modified_base 20: mod_base = OTHER; note = 2'-O-methoxyethyl(MOE) adenosine-3'-phosphate
  modified_base 21: mod_base = OTHER; note = 2'-O-methoxyethyl(MOE) adenosine-3'-phosphate
tcaagactttttcgaatgcaa

SEQ ID NO: 2612 - RNA, 23 nt, synthetic construct
  source 1..23: mol_type = other RNA
  modified_base 1: mod_base = OTHER; note = 2'-O-methyluridine-3'-phosphorothioate
  modified_base 2: mod_base = OTHER; note = 2'-fluorouridine-3'-phosphorothioate
  modified_base 3: mod_base = OTHER; note = 2'-O-methylguanosine-3'-phosphate
  modified_base 4: mod_base = OTHER; note = 2'-O-methyladenosine-3'-phosphate
  modified_base 5: mod_base = OTHER; note = 2'-O-methyladenosine-3'-phosphate
  modified_base 6: mod_base = OTHER; note = 2'-fluorocytidine-3'-phosphate
  modified_base 7: mod_base = OTHER; note = 2'-O-methyladenosine-3'-phosphate
  modified_base 8: mod_base = OTHER; note = 2'-O-methylcytidine-3'-phosphate
  modified_base 9: mod_base = OTHER; note = 2'-O-methylcytidine-3'-phosphate
  modified_base 10: mod_base = OTHER; note = 2'-O-methyluridine-3'-phosphate
  modified_base 11: mod_base = OTHER; note = 2'-O-methyladenosine-3'-phosphate
  modified_base 12: mod_base = OTHER; note = 2'-O-methylguanosine-3'-phosphate
  modified_base 13: mod_base = OTHER; note = 2'-O-methylcytidine-3'-phosphate
  modified_base 14: mod_base = OTHER; note = 2'-fluoroadenosine-3'-phosphate
  modified_base 15: mod_base = OTHER; note = 2'-O-methyluridine-3'-phosphate
  modified_base 16: mod_base = OTHER; note = 2'-fluorocytidine-3'-phosphate
  modified_base 17: mod_base = OTHER; note = 2'-O-methyluridine-3'-phosphate
  modified_base 18: mod_base = OTHER; note = 2'-O-methylguanosine-3'-phosphate
  modified_base 19: mod_base = OTHER; note = 2'-O-methylcytidine-3'-phosphate
  modified_base 20: mod_base = OTHER; note = 2'-O-methyladenosine-3'-phosphate
  modified_base 21: mod_base = OTHER; note = 2'-O-methyladenosine-3'-phosphorothioate
  modified_base 22: mod_base = OTHER; note = 2'-O-methyladenosine-3'-phosphorothioate
  modified_base 23: mod_base = OTHER; note = 2'-O-methylcytidine
ttgaacacctagcatctgcaaac

SEQ ID NO: 2613 - RNA, 21 nt, synthetic construct
  source 1..21: mol_type = other RNA
  modified_base 1: mod_base = OTHER; note = 2'-O-methoxyethyl(MOE)-thymidine(or 5-methyluridine)-3'- phosphorothioate
  modified_base 2: mod_base = OTHER; note = 2'-O-methoxyethyl(MOE)-thymidine(or 5-methyluridine)-3'- phosphorothioate
  modified_base 3: mod_base = OTHER; note = 2'-O-methylguanosine-3'-phosphate
  modified_base 4: mod_base = OTHER; note = 2'-O-methylcytidine-3'-phosphate
  modified_base 5: mod_base = OTHER; note = 2'-O-methyladenosine-3'-phosphate
  modified_base 6: mod_base = OTHER; note = 2'-O-methylguanosine-3'-phosphate
  modified_base 7: mod_base = OTHER; note = 2'-fluoroadenosine-3'-phosphate
  modified_base 8: mod_base = OTHER; note = 2'-O-methyluridine-3'-phosphate
  modified_base 9: mod_base = OTHER; note = 2'-fluoroguanosine-3'-phosphate
  modified_base 10: mod_base = OTHER; note = 2'-fluorocytidine-3'-phosphate
  modified_base 11: mod_base = OTHER; note = 2'-fluorouridine-3'-phosphate
  modified_base 12: mod_base = OTHER; note = 2'-O-methyladenosine-3'-phosphate
  modified_base 13: mod_base = OTHER; note = 2'-O-methylguanosine-3'-phosphate
  modified_base 14: mod_base = OTHER; note = 2'-O-methylguanosine-3'-phosphate
  modified_base 15: mod_base = OTHER; note = 2'-O-methyluridine-3'-phosphate
  modified_base 16: mod_base = OTHER; note = 2'-O-methylguanosine-3'-phosphate
  modified_base 17: mod_base = OTHER; note = 2'-O-methyluridine-3'-phosphate
  modified_base 18: mod_base = OTHER; note = 2'-O-methyluridine-3'-phosphate
  modified_base 19: mod_base = OTHER; note = 2'-O-methylcytidine-3'-phosphate
  modified_base 20: mod_base = OTHER; note = 2'-O-methoxyethyl(MOE) adenosine-3'-phosphate
  modified_base 21: mod_base = OTHER; note = 2'-O-methoxyethyl(MOE) adenosine-3'-phosphate
ttgcagatgctaggtgttcaa
